United States Patent Application Publication US 2013/0330799 A1 - sequence listing, part 2

SEQ ID NO: 37 - DNA, 75163 bp, unknown
  Altogen 322075 strain
  misc_feature (40753)..(40753): n is a, c, g, or t
accggaatcgccagccacagcgtcaccatcagaccgcgcccggtatcaccggcagagtgactgctgaaagagagcgtatcaaatattgcggtattccagtgcgggatcagatacagcgccagcaccatcagaacggccacaaacgggaacaccagcacactcattgctttgacaatcgcggcttcaccgaagcggataatgcacataatcccgacaatcagtaccagggacagaataatgcgcggcggcgccgtcatatgcatctggttaacgataaagctttccaccgtattggtgatggccacactgtaaaccagcagaatcgggtaaatcgcaaagaaatagagcagagtgataaggttccctgctttggcgccgaaatgctcttccaccacttcggtaatatcttcacccggatttttaccggataagataaagcggcacataccacggtgcgcgaaaaaggtcatcgggaaggccagcacggccataatgataagcggaagcagcccgccgataccggcgttaatcggcagaaacaggataccggccccgaaggccgtgccgtacagtccgagcatccagacggtatcggatttacgccatttgcggtaatcattgccggtgtcagtcttgctgaccacagcctgcggatgtgttgtttccatagatgtctccaaatttgcaacaaataacaacgaaaaattgcacggtgagctgtgcacaaaatgtgtctctgaagcagggtctatgtacgcaaccggataaaaataagtaaaacgggaaaattacctgtaattgcttaccggtaaaaataataaacagcagcgacctgatatctgcaccgggcaaataaggtctctgcattaattcatattcaaaagaatctgagattgataactatctttttgtagtgaaaatataccgttttatagtgaaaaacgctgtgatctgtatctcagttgctataaatatcattaaaagtggttatgttgcaacatttaataatgatgttaatcggtttttgaggaatgatatatgccgaaacggcataggagagcagatattctgcaataatatcgttttcgcctgttttttatttaaacaaatttatttattcagatgtgaattagtatatgtgctgcataatgtcgcattattataagatagaggaaaaagcgtttgtcaccgtgtgaaaatcatttcatggatatgaataattatgttattcattgttttttaacgataaattactgtgcttttgagtttgtggtgattaagggagaatacggggaatccgatagcataaaacaggggctatataatgagcacattgtatatccctgatgattaaaataatttttttaatcgcgaattaagtggtctgagtgatattgatgaagaataaaacagaaatgttaaataaataccggcacacggccggtatttcagggtttatttttgtacaggttatccctgcacccagcctttacggataggcatggcaaaacagtgccggtagagcacctgcaaccggttttgcagtgccgggccgaacaggctccagagcagctctgtcagtgcacaggcaatcagcacagtgataaaggcacccagcatatctaccggccagtgaacgccgaggaaaacccgcgaccaaacaacaataagtgccgggatcatcagcagcaatcctgcacggacattgcaccagaacaggcagcccagcgcaaaggtaaatacaataatgccgtgattactcgggaatgaggccgtcggtgcgtgatcaaggaaactgtggccgaacggttcggcaaacggacgggcatgcggccagagtgtgccgataatccaggagactgcgaaaccaatcagcagagcaatggcacttttgcagacagcgcggcgctggcggaccatattctccggtgttccccgcagccagaaccctgcggcgacaaccggaaacagcagaaccagatatttagccgcgaaagtggcggcagtaatcatggcatgagacgtttccggcgtggcattaatcaggagaaaaagcgaatgattcagattttccagcacagcagactccttaaaaaacacacccgtatatacccggtaataaaatgacgggtcagggtagccgtcttgtgcatcaaggtaaagtgaaaatgtcttggttaatcgtgctattacgtaacattgcagaaaactgacaaaatctgaaataacaacaggcgggataaacagcaggcaataaaaaacccgatagttaaaaccaaattggtgactatcgggcttcctcaatcttggggatattcaaagaaaagcagtggcacttattcagactgcgccccggtaagaaagttcgaaaaaagattcaaaaaaatgaaaataattttttggtgttgaaaatcagcgggatagggaggaacaaataagccgcttcccgggcgggaaacggccggatagcttagctgaacaggccgagattggcttttgcgtaagcttcgaaatcagtgcagccgccgatatgttcttcatcgataaaaatctgaggaactgtttcaaccggtttaccgatagttttggataaatcttctttgctgatgccttcagcgtgaatatcaatatagcgataatcgaagtcatcacgctcatttttcagtttttctgcgagttctttcgcacgaacacaataaggacaacccggacggccaaaaataacggtatacatgaaaagctccttcattcatcagtaacaccggaagtggtgctttaatgggataaattatgcctgtatcataacggatagaaaagaatgttgtgacgatttgtgcggtagtccgcaccaatggttcagtgactatccgcagtgcggacataaaaggcagaatcacagaggataatatgaccagaaaacagccgcgacaaatgcgttcattaggggatatgccgcgcccggtaattatctgtgaggtcatcggtgtgatattactggtgctggtctatcttgcggtgaatgattttatttcgctgccgggctttatgagcagtaaaaatgccctgatggtgatggcgtttgccggcctgggatgtctggtaccggcggcaatcaatattgtctggcgggccatcagcgccatgccgtccgtgggtattgacagcaaaagcggggcagacaaaaagacccggcagaagaaaaatgaaaaaaagcaataaaacgttattccccttcacgtttttcagctaagatccgtcattggtctgcgggtgacggttttccccgctgtacttttgtttttccggttaaaaggtttcaggttcatgatcattcccgatctcacgatattacgcacatggctggatcagatgaaactctcctgttttgagtgtgattcctgccaggcactgcatctgccgcatatgcaaaatgtggacggtgtgtttgatgccaaaattgatatccttgacgatatgctggtgttctcggcgctggcggaagtccgcccgaccgcgattgtcccgctgattgccaacctgagccagatcaacgccagctcgttgctggtcaaaacctttatggatattcaggattccgccatgccgaagctggtggtctgttactcgctgccgctcagtgccgggctgacatttgagcagttctctctctccctgcaactgatggaagagcaggtcggtgcagtgatttttgagctgttcagtaacaatatgctgtttgatccgaatgatgcggaaccggaagatgaagaaagcttccgcgctgattccgttccttctccggtgatccactgattatccgcaccactttcgatatccgggacaccatcatgcattgccctcagtatcccgccggccgctgccgttcctgtcagtggcttgaaaaaccctatattcagcagattgatgataaagagcaggatctccgcacgctgctctcgccgtttgccgtacaaaactggctgccgccggtccgcagcgcggaaaccgcgttcagaaataaagccaagatggtggtcagcggcagcgtggagcgcccggtgttcgggatcgtgacggataacgacccggtggatttatcggactgcccgctctatccgccgcattttgcagaggtgtttgctgcactgaagccctttatcgcccgtgccggactcacgccgtacaatgtggaacgccgccgtggcgaactgaaattcctgcttctgaccgaaagccgcgccagcggtaaaatgatgctgcgctttgtgctgcgctcagaaaaaaaagtgtcccaattacaggcggcactgccgtatctgcaggcgcaactgccgcagttatccgtgatttccgccaatattcagccggtcgcgatggcgattctggaaggggagcaggaaattatctttaccccggacgaggtactggaagagaccttcaacggtattccgctctatatccgtccgcacagcttcttccagaccaatccggctgttgccgcgcagttgtatcatactgccggacagtgggtgcgtgagctggggatcacccgtttatgggatctgttttgcggtgcgggcggattcggcctgcactgtgcggataaatccacacagctgaccgggattgaaatcagcccggaagcgatagcctgtgccacccgctcagcggaaaaaatggggctggagaatgtcacctttcaggcgctggattccgcgcagtttgccctcggcaaatccgccgtgccggaactggtactggtgaacccgccgcgccgggggatagggaaagcgctgtgtgattatctcaataccatggcaccggagacgattatctattccagctgcaatgcacagagtctggcacaggacctggcgcatctcacacaatatcagccgcagcgcgtgcagctgtttgatatgttcccgcataccgcacattatgaagtgctggtgctgctgacccggaaataatcatcagagaataaaaaaaacggggctgcaatgtgaattgcagccccgtttctgtatgagcggatcagttacggtgttcgaatgccagcgcgcggcgttcaatcagacgcatcgccagcgtcagcagactgttgacggccagataaataatccccgcagcaataaagacgttcagatcgtaatcctgaccaaacaggcggcggctgtagcccatcacttcaagcagcgagatcgtcgtggccagtgaggtacttttgaagatcagcaccacttcgttggaataggacgacagtgcacgtttaaaggcatacggcaggatgatccgcatggtctgcttctgtgacattcccagcgcctggcaggactgccactgacctttcggaattgctttcactgcaccgtagaacagcagtgtcgaataggccgcactgttgagcgccagtgtcaccatggcacaaagccacggggaggacatcagttcccacagcagcggatagtttttcagcccttcaaactgcgcaggcccgaaataaatcaggaaaaactggaccagcagcggcgtcccggtaaacagggtgatataccctttgaccagcggcgtcagaatccggggcttgagagagagtaccagtgtaaacagcacggacagcagaaacgccgtgaacagtgcggtaaaggtcagtgacagactgaccggcaggcccggtaagacggcaagaatataatcaaatatgctcattggccgctccgttcaaaacgtgtggtacgcagttcgatacgtttgaggatgtactgactgaccagcgtgatggcgaggtagataagcgccacgatgctgtaccaggtgaaaggttcttcagtacggcgggcaatgctttgtgtctgcagcatcagttcgttaataccaatcagatagaccagcgcggtatctttcagcagaaccagccactggttacccagccccggcagggcgtggcgccacatctgcggcataacaaagcggaggaaaatggtggtgcggctcagaccaagcgcctggcctgcttcccgctgcccgtccggcaccgctttcagggcaccgcgcagggtttgtgatgcataggccgcatagagcagagacagggcggtgataccgctgaagatcggcacatacgggccgttgtcgatctcaagtgtcagggtgaagaagcccagattgataccgtcgctcagctgaataatcacttcctgcgtgccgtaatagacaaacaggaccaccagcagctcaggtaaaccacggataagcgtaacaagacaggttccggcaaaagcgacaggtttccagcgcacggtttcccagagggtaaacagcatcgcgagcaccagaccaatcaggagtgcagaaacagcaaggccgacggttaccccggcggcgcttgctaaagagagaaaatcgttcattaattttttatgttattactcaaaccatttcttatagagggtatcgtaagtaccgtccgctttgacctcaccaagcgccttgttgagtttgtctttcagctcgctgttgcccttgcggaccgcaatagccaggccggtgccgaaatattccggatcggtgacgcgctcacccacggttttcagattgtcgttgctcttcagccattcattgataacagctgtgtcaccgaatacggcgtcaatacgtccgcctttcagatccagtaccgcgttctggtagctttcataaggcacaattttcatgtccttaaactgctccatcaggtatttctgatgagtggtgccgttctggataccaatctgtttccctttgaggctgtcaatgctatcaaatttgcccgcaactgcaacgaaaacagcagagttatcataataggtattggtgaaatcaacctgcttctgacgctcaggtgtgacgtcaattccggccatcagcgcgtcaaaacgcttgtatttcaggctcgggatcaggctgtcaaacgcctggttggtaaaggtacattccgcatcgattttggcacacatcgcctgagccagatccacatcaaaaccgacgatttcgtttttctcattcacggtttcaaacggggcataactcgcttctgtcgcgaaacggattttttctttttctgccgccgctgcggagaaagcaaacgcgccgattaatgcggcaataaccagttttttcatagcaacatcctatttttaatgttcagtggcagaaaataatcagtgtgacagataaccggcaaatgcctctgtctgcggcgtgataaagcattgggcgccgccctgttccacgatgcggccgttttccatatacaccaccttgctggcggttttacgggcgatatccacttcgtgagtcacaatcacctgggtaatcccggtctgtgacagctctttaataatatcgacgacctgagaggtgatctccgggtccagtgccgctgtcggctcatcgaataacagtacctgcggttccatcatcagggcacgggcaattgccacacgctgctgctggccgccggataaatgcagcggaaaacggtttgcaaaatcagtcagacgcagacgtgtcagcagtttttccgcttttgcctgagccgcttctctggtcagacccagcacccggatcggcgcttctgtcaggttatccatgacagtcagatgcggccacaggttatattgctggaataccataccgacgttctgacgcagggaacggatctctttggcagacggcgtggtggtaaaatcaaaatggtgatccgcaatggtcagttcaccggaacgcggcatttcaagcaggttcagtgcccgcagcagcgaactcttaccggcgccgctcggcccgagcagtaccatggtttcgcctgcaccacattccaggttgatatcaaacagcgcctgatgctgtccgtaaaagcaattgatgttttttaattgaatactcatgctgtaattctgcatactcagtgacgttgagtgaatattaacgccgtaagaataaatatgcaattatttctgcataaaaaactactaaaaaagcaaactaatgacttttactgagtgattatgtcttatcagatgccgggaagacgtatgctgccgcccgtttgacgatggttttcgccattcctttaaagatgaataaatgagcaggcatcatggcgaaccagtaaagcagcccgctgaatccggcgggatgccaccaggcccggacatccagcgtccgctggtggccgtggtcgcggatggtaaaggtcagccgtcccagtccgggggccttcataccgaacagcagggagagctgctgccggggttttacggtgatcactttccagccatcgattttatccccgggttcgagggtatcgcgatccgggcggccgtaagtgattttattaccgcacaggtcatccagccgggcgcggactgaccacagaatattggcgtaaaaatagccgtctttgccgccaatctgttgtacaacatgccacagggcatcggcggaggcggaagtattcagggtaaaaccggcctgtttgggatagaaaccaaagcccggccgccagcgggcgcggacctccgggtcatacccccagtcttcattatccacggcatccgcttcatctttaagggtcttgcgcacggcatcatcaaaactgagcagcgtctgcgggatcagcgcctgaagcggttttccgtcgccgggcagatcatatttcagacccataatcagctctttggcgataccttccggcaccgtggtgataagccgcagaaagtgaactgaaatcagccgcagcgggatcggcagcgggatcatcagccgttttttgccgctgatggcaataaagtggcggaacatctccagataactgaggtaatccggccccgtggcatcaaaacggcggttttcggttgccgggtgggagagcaggccggtcaggtaattcagcagattttccagtgccaccggcgaggattttgagcgggcccagcgcggcggggtcaggatcggcaggttgtacaccatgtcgcgcatgatctcgaatgccgccgagccgggaccgacaataatggcagcgcggatctcggtgaccggcacgcggctgtccgcgaggatttcgccggtcagcctgcgggcggcgaggtgcggagagtcactgtctttatgctgcatggcgctcaggtaaatgacttcccgcaccgcagatttattcagcatctcctgcacgttttccgccgccaggcgttcccgtgccagtaagtcatcctcatccgtcatactgtggacgaggtaatacactacatcaatgtcctgaaacagggtttccagggtggatttgtcatacagatccgcatagcagcagcgggtattttcccagccctgtgcctgcatccactccacccggcgggcggcggcagtgacctgatgaccggcggcgatcagctgcggaataagattttgtccgacataaccgctggcacccagcactaaaatccgttgttgtggcatacgttttcactcttcaggtaaacagggctatcagcaccggggcaaacaggctgaggacaaagccgtgcacaatcgcggccgggacaatcgacacaccgccgctgcgctgcaataccggcagggtaaagtccatcgtggtggcaccgccgaggccgagtgctgcggcgcggtggcggttgatcagcagcgggatcagcataatcgcggcaatctcccgcgccaggtcgttaaagaagccgacactgccgagcaccggaccgaaagcgtccgtcagcagaataccggacagcgaataccagccgaagccggaggagagcgccatcccggttttgaccggcagcccggctatcagtgccgcgagtgcaccgccgagcagcgaggtaaccaccacaatcagcgagaccagcataccgcggcggttgatcaggatctggcgcagcgtcatgccgctgttgcgcagttgaatcccgacaaggaacagcaggaaaatcagtgcgtattcactggcggcaccggcaaaggcgagaaaggaccagccgaataacccggtggcaaagccgaccagcagcacaccacacagttgcagggattccagcaccatatgcaggcgggaaggcggtttttgctgtttgtgagccggaacctgccacgggtattttttgccgtataaaaacagtccggcgaggttacagcccagcaccaccacagaaaaggtcagggtgtactgcacaatcaccagcagatttgccccgaggttttccaccagcgccaggcttatccccatcagaaacaggatcacatacaccatcgcgctcagaccgcgaccgatgatttttttcagtgccgtgctgctgaccgggatgagataacccgcaataagcggagcgagaataattaataaccctgaatacatgtgtgtcgtttccgtaaaaataatgccgtctttacttatgttcgtgtcagtatctgattaaaaagaagacgattatagcggcatcctcaccataattgctacgtatccctctgttttcgtgtttagtataagtcaaaaccgtttttatttattacattgtgataatactttattgtgatcattattgtgacagtattgtcataaaacaggcggtatccggcaaacagtgagggaactatgattctggaaagagtggaaattctgggttttcgcggtattaaccgcctgtcattaccactgaccggcaatacggtactgatcggtgagaacgcctgggggaaatccagtctgctggatgccctgacgctgacgctgtcaccgcaggcactgaatgcgaaatttgtcctgagtgatttttatcacgctgctgacagcgaagccggacctgtgcgccatctgcagattgtcctgacattccgtgaaacccggcccggacgttcccgctcccgccgtttccgtgagctggcgccgctgtggcgtactaacggggacgagtatctgcggatcaactaccgcgtcagcgcagatctggcggatgataacaccattaccagtcagcgcacctttctggatgaggcgggcgagccgctgctgccggcggaagccgataagtttatcagtgagattatccgcctctatccggtgctgcgtctgcgcgatgcccgttttatgcgcggcctgagaaaaaatgtgcctgattgtgaggatgaggaatacgatctccgcacacagaccgagacgttcaataaccggatggcggatctgacccgcgctctggtgagcaacccgcagacactctccaatgatgatttgcaggacggccttgaggctatgaaacagctgctcagccactactttgccgagcagggggagtacctgctcgatcgccgtaaagccaaacggctgaatatcgaaccgcgccagcgggcgtggcaggcgctggaagggattaaccgcgtggtggcaggccccaaccagcgtaatgtgcggctgattatcctcggtatgtttgccgcgctgctccagtccaacagcggtctgaaacttgatccgtatgcccgtccgatcattatcgtggaagacccggaaacccgcctgcatccgatcatgttgtcggtggcgtgggggctgctcaatctgttttccttacagcgcattaccaccaccaactccggtgaactgctttcactggtaccgattcatgatatctgccgcctggtgcgggaatccacccgcgttgccgcctaccggctgggggaaaaccatctgtcaccggaagagctgcggcgtatctcattccatatccgctttaaccgcccgtcggcactgtttgcccgctgctggctgctggtggagggagagacggaaatctggctgatgaacgacctggcaaaacagtgtaattattactttgagaccgaagggatcaaggtgattgagtttgcccagtgcggtcttaaacctttgttaaagtttgccaacaaaatgggtatagaatggcatactctggttgacggcgacgaagccggtaagaaatacgcggccaccgccgcacacttctcatcggggctcaatgatgtcgagcaggacagactgacccgtctgcccgcaccggatatggagcactttttatatcgcgaggggttcagccgcctgtatcatcaggtcgcggatattccggaaaatatgaaaatgccggcccgccgggtcataaccaaagcgattcaccgcacctcaaaaccggatctggcgattgcgattgccaacaatgcggcgagccggggtgtggattctatcccgctgttgctgcgccggatgttctcccgcgtggcatggctcgccagagggcgcgctaactgaggaaaaaggtgttaatgaaagcagtttcaaagaaaaaaatcctgaccgccggcattctgattcttctgatcgccggcggtttctggttctttacccgcgaagatgcaccggtcagctatatgacagcggatgtgcagcgcggcacactcgaaaagaaagtgatggctaccggcaagctggatgcactgcagaaagtggatgtcggtgcgcaggtcaacgggcagttgcagaccctgaatgtcaaagagggggattttgttaagaaaggcgatctgctggcagtcatcgacccggtcaaagcacagaacgtggtgattgaggctgagcagacggtcagtgaaatcaaagcacgtctgaaacaggcagaggcggagtatgcctttgcacaggcgacctatcagcggcggctggcactggcaaaaactcaggttatctcaaagcaggatgtggatgaggcgcggcgcaatatggatgtgcagcgtgcggcgattgatacctacaaagcccaggtggcacgcaatcaggccacactcgataccgcccgcaatgatttgcagtacaccaatatccgcgcgccgatggacggcgtggtgacggagctgaaaaccttacagggccagacggtgattgccatgcagcaggcgccgaccatcctctccctggcggatctcgataccatgctggtgaatgcggaagtctccgaggcggatgtggtgtatctgaaacccggccagaaagcgacgttcagtgtgctgggcgcaccggacaaatccttcagcggcgtgatcaccgatatcctgccgaaaccgcagaaaatcaatgacgccattttctattatgcccgttttgaagtgccgaacccgcagcatgtgctgaagctggacatgactgcccaggtcaccatcgcgctggaaaaccgcgaaaacgtgctgaaaatcccgctggcggcactgggtaaagagatttccccgaccgaatacgaagtgcaggtgctggtgaatggtcagccggaaacccgtcaggtgacactcggcacccgtaatgatgtggaagctgaggtgacaaaaggtctggcagagcatgaaaaagtggtgaccggtattgatgacggcacagcaggataattcatgagcgcattattagaactgcggaatatttaccgccgttatccttccggagacagcagtgtcacggtgctggatgatgtctcactgactatcagtgccggtgaaatggtggcaattatcggccagtccggttccggtaaatccacactgatgaatatcctcggctgtctggacacgccgagcgacgggcactattttgttgccgggaaaaatacagcggagctgagcggtgatgaactggcggcgctgcgccgcgagcatttcggctttattttccagcgttaccatctgttatcccacctcagtgctgagcagaatgtggaaatgccggctatctatgccggactgagtgcccgtgagcgccgtgaacgggccgcagcgctgttgcagcgcctggggctgggtgagcggctgatttaccggccgggacagctctccggcggacagcagcagcgtgtcagtatcgcccgtgccctgatgaacggcggggaagtgatcctcgcggatgagccgaccggtgcactcgacagccagtcgggcaaagaggtgatggctattctgcgccagctctgtgacgccgggcatacggtgattatcgttacccatgatccgtccattgccgcacaggccgcgcggatcattgaaatcaaagacggacatatcctcagcgacagcggatcagtcattaatccgcaggcgaaggcactggccgccaaaccgccgctgaaaagcagcgcgttcagccgtttcctcggccgctttaatgaagcgctgctgatggcatggcgcgccatggtggtcaacaagatgcggactctgctcaccatgctgggcattattatcgggattgcctccgtggtgaccattctggtgatcggggatgctgccaaagcgctggtgttgtcggatatcaaatccatcggcaccaacaccatttttgtctatcccggcaaagactttggcagtgacccggggcaggatcagcaatctctgaagcccggcgatgtggatgtgatccgccagcagccgtatgtttatgcggcgtcagcggaaattgagaacggtgcgcgtctgcgccggggcaatcttgattccgcagcccgtgtcaccgggatcggaccggactttttcatcgtgtatgacatgcgtttcggcgaagggcgggcgttctctccggagatgtatgagcgccgctctcaggttgttatcatcgatatgaacaccaaacgcaaactctttccgcatcagaataatgtgattggggaaatgctgctggtgggcaacatgccagcaacggtggtcggtgtgattgcggatcgcaaatccatgttcggtaactcgaaaaccttacaggtctggatgccgtacaccaccctgaccgggcggctgatgaagcgcaactatctggatatgatctctgtgcgcatccgcgatggttacaacaccaaaaatgcggaagagcagctggtacggctgatgacgctgcgccacggcaaaaaagacactttcacctacaacctcgacagcattgtgaaaaccgtggataaaaccacgaccaccatgcagctcttcctgacgctggtggcggtaatttcgctggtggtgggcggcatcggtgtgatgaacatcatgctggtcagtgtgacggaacgcacccgcgaaatcggcatccgtatggcagtcggtgcgcgggcaggggatgtgatgcagcagtttctgattgaggcggtgctggtgtgtctgatgggcggggctatcggcctcgggctttcttattccattgcctttgccgccaaaatggcgctgccggactgggaatttgtcttccgccctgcggcgattgtcagtgcggtgctctgttcgaccgctatcgggatcatcttcggctttctgccggccagaaatgcggctaaacttgatcctattgatgcactggcgcgggagtaaccgcgcacagtctgaaaatacgaatgcgtcgcggaatgacgattgacattaccgcgacgatccgcataattttgttaaataccgtgttacggcgctgtggtgtcgtcatcttcagtaaccggaataatcacactgacgtgatgcccttttggtccctgaatggtgtcataattcactttctgacccgccttcagcgtgcggtagccgtccatctgaatcgtcgaatagtgtacaaaaatatcgtcaccaccatccgacgggcagataaacccgaaacccttggcgttgttgaaccacttaacagtacctgtttccatactgttacaaccctcatctgtcaaacgattgaaaaatgctgcacaatgcaccatatgatccataatactcagtaatgaagtatcagctgtacgcggatatactggttacgttgtacattatttatactctattgaattagagggtaacgtcaagcctttgtttacagcaacactgtattggcctgtaaagtttgatacagataacgctaagtattgatacgcctgatgtggcgtacgttttctataaccggaatagcaatgagtcactatcaatctgaatcacaaacggatgtcacgctcagggaaaaagcgctgcagaagatacagccaccgtcaatgtacaaggtggttttaaacaacgacgactatacccctatggactttgtggttgaagttttacaaaagttcttttcttataatgttgatcgtgcgacgcagattatgctcgacatccattatcagggaaaagggatctgcggggtatttaccgctgaaatcgctgaaatgaaaacaacactggtcaatacgtacgcgaaagacaacgatcatccgttgctgtgtacactcgagaaggtataagaatacactttgtttctctgaatggaggtgcctatgctcaatcaagaattagagctcagtctgaatatcgcctttgccaaagcaagggacaaccggcatgaatttatgaccgtagagcacctgctgctggcgttattaggtaacaaatcagcccgtgaggcgcttgaagcctgccgcgttaacctggccatcctgcgccaggaacttgagcattttattgaacagaccacaccgctgctgccggaaggggatgatcgcgaaacccagccgacactcagtttccagcgcgtgttgcagcgcgccgttttccatgtccagtcatccggccgtaatgaagtcaacggcgcgaatgtgctggtggccattttcagtgagcaggagtcccagggggcttatctgctgcgcaagcacgatgtcagccgtctggatattgtgaattttatctctcacggcaccaccaaaggtgaggatgaaaatgagagcggtccgtcctttgatgagccgtcacagtctgccgccgaagagagtaccggcggcgaggacagcctggataacttcaccaccaaccttaatgacctggcccgtaaaggccagattgacccgctgatcggccgtcaggcggagctggagcgcaccattcaggtgctgtgccgccgccgtaagaataacccgctgtttgtcggggaatccggggtcggtaaaaccgcgattgcggaagggctcgcctggcgtatcgagcaggacgatgtaccggaagtgatcaaaggctataccattttttctctggatatcggctcactgctggccggtaccaagtaccgcggtgatttcgagaagcgctttaaggcgctgctgaaagtgctggagaaaaacgaaaaaagcattctgtttattgatgagatccacaccatcattggtgccggtgcggcatccggtggtcaggtggatgcggcaaacctgattaaaccgttattatccaacgggaaaatccgggtgattggttccacaacctatcaggaattcagcaatatctttgacaaagataaagcgctgccccgccgtttccagaaaattgatatcaatgaaccgactgccgatgaaactgtgcgcatcattaacggcctgaaagccagatatgaggcacaccacgatgtgcgttacaccgcgaaagctattcaggctgccgtggatctgtcggtgaaatacatcactgaccgccatctgccggataaagcgattgatgtcattgatgaagccggggcaagaacccgtctgatgccgctgagccgccgtaagaaaaccattggcgtcggcgaaattgaggcgattgtggcgcggatcgcgcgtatcccggaaaaaaccgtttccagcagtgacaaagatctgctgcgtaacctcgacagccgcctgaaaatgctggtcttcggccaggatccggcgattgatgccctgacggaatccatcaaaatgagccgtgcgggtctggggaacgagcagaaaccgattggtgccttcctgctggcagggccgaccggggtcgggaaaaccgaagtcactgtgcagttatccaaagcaatgggtatcaagctgctgcgctttgatatgtccgagtatatggagcgtcacaccgtcagtcgtctgattggtgcacctccgggctatgtcgggtttgatcagggcgggttgctgacggatgcggttatcaaacatccgcatgcggtggtgctgctggatgaaatcgaaaaagcgcacccggatgtctttaacctgttattacaggtgatggataacgggacactgaccgataacaacgggcgcaaagcggatttccgtaatgtgatcctggtgatgaccaccaacgccggtgtgcgtgaaacccagcgtaaatccatcgggtttaccgagcaggacaacagcactgacgcgatggcggaaatcaaacgggtgttcacaccggagttccgtaaccgtctggacggcattgtctggtttaatgcgctgtcgcagccgattatcgctcaggtggtcgacaagtttattgttgaactccaggcgcagctggatgcgaaaggtgtttccattgaagtgtctgcccgtgcccgtacatggctggcagaaaaagggtatgacccggcgatgggcgcacgtccgatggcccgtgtgattcaggataaactgaaaaaaccgctggcgaacgaattactgttcggtgagctggtgaacggcggctcggtgattatcgatcttgataagaagaaagatgaactgacttaccgcttcagtgccctgaaagagaaatccggcgacccggtagcctgacagaaacgatcaccacaggacacgcacttcggtgcgttgcctgtggtgtctttttatgaggcgtggcctgcagggatcagcggctacggaagacgatacggcctttgctcaggtcatatggggtcagttctactgtaaccttgtcgcctgtcaggatgcggatatagtttttacgcattttaccggagatatgtgcagtcacaacgtgtccgttttccagttccacacggaacatcgtgttcggcagtgtatctaacacagtgccttgcatttcaatattgtcttctttggccatctaatcctctaatgttaataaccagtattttcaaaccgcaagataatgccgaaaaaccgggattatgtaaaggaatgatattttttaagcaccgcgtctgaaacataaaacgggctgaaacataccatttcctgttggtttacagcgattttataaaaaaggcggcagttgtgacggcaccggacgtgcgaatgtctgcggctgccagcatgactgcggtaaatgattatcacgcagctgataaagctgacggataaacgcctgtcgcgggatctcccgcgcaccgaatgattcggtgtaatgattcagtatctgacaatcaaacatcctgccgccgtggccggtaaagtgggcaaaaaaggtcataaaagcgatttttgacccgttactgacacggctgaacattgactccccgcagaacagtaacccggtattcaggccatacagcccgccgaccagcgcgtcatcatcccacacttcgacggaatgagcacgtcctgcctgatgcagccggatataggcggccacaatatcgtcccctatccaggtgccctcatcccgctctgtgcaggcccggatgacctgtttaaaggcatgattaagagtcacccggtacgggtgttttttcagaatcttgtgcagcgaacggctgacatgcagctccgccggatacaataccgcacgcggatccggcgaccaccacagaatgggttcgccgggggaataccacggaaaaatcccttcccggtaggcgagcagcaaccgggaaggggagagatccccgccggtggccagcagtccgtccgggtcggtcagcgcgtgttcaacaggcggaaagagaagttcctcatccagctgataaaacggcatcagatcccccggtcatgaccggaatacggttcacaaactgataataacggcctctgcgcgccagcagtgcgtcgtgagagccttgttcggctatctgcccgccatccatcacgcacagcgtgtccatgtgttccaggccctgtaaacggtgggtgatgataagcatggtccggtcacggccgatatcccgcagcagggcgagaatatgctgctcggtatctgcatccagtccttctgtcggttcatcgagcagcaggaacggcgcattgtgcagcagggcgcgggcgatgccgagacggcgctgttcgccgccggaaagcagacggccgccttcgccgatccaggcattcagtccctggtcgttatccagcagattttccagcccgacctgtgccagtaccgcattcagctgtgcatcggttgcttcgttatttccgatccgcagattaccgcgcagtgtgttattgaacacatgaatacgttgcggaaccactgccatcagtgaccggagggtattttcatcataagcggcaatcggctggtcattcaggcggatttcaccttcactgacatcccatgcccgggtcagcagctgcaataaggtggatttcccgcagccggttttccccagcagggcaaggtgctcaccggcacgcagtgtcagggagatatctttcagcaccggcagcgggtgtcccggataggtaaacccgacaccactgaggctgacgctgacctgtgcggaggctgccggaccactggccgggaaagtcacttccggtttggtatccactatctgcgatacacgctctgcggaggtcatcacctggccgagatgctggaaagccactgccaccgggcctaatgcctcaaatgctgccagggcacagaacacaaacagggcgataatggcgccgctttcgcggtacggccagctgaccccggatgccatccacagcatcagcgcaacagcaaacccggtcgccagaataataatcgcctgggaaagcccggtcagaccggcctgacgctgctgctgtaccagccagcgttgttcagtctccgccagttgctcgcggaagcgggactgcgcaccgaaaatagtcagttctgcctgtccctgtaatgcgctggtcagcagggtgcggtactgtgcacggagtgtggtcagctgcacgccgattggcttaccggcgtaatagaacaccaccggcagggcaaacagcaggaaggtcataaacccgcccagtgcataagcgatagtcagatcgagaaaacccagcccgaatgtcagcactgcaatcaccaccagcgcggcaacaatcggtgaaatcacccgcagatagaggtgatccagcgtttccacatccccgaccagccggttgagcagttctccctgacggaagcgggcaataccgcccggtgtcagcggcaggattttctcaaaggcaaatacccgcagatgtttcagcacacggaaggtcgcgctgtggctgaccagccgttccgcatagcgtccggcggtgcgggagatagcggcaccgcgcaccccggcggcaggcagcatatagttaaaaaaggcaatccccggcacaccggcaatggcagtaccggcgaggaaccagccggacagcgtcagcagcccgatactggcgagcagcgtggcaatcgccagcaggatcccgagtgtcagtaaaaaccagtggcggcggtagagggctaaaaacggcagtaaaacacgcatgattacagatcccccgtccggtgtgacagcagctgtgcaaatgcaccctgttgctgttgcagagcagcatagctgccctgttcaataatcagacctttatccatcacccagacttcatcatagtcacgggtttcttccagcaggtgtgtcaccagcagggtggtttgctgatgtgccgcctcattcagggcatgcatcacgcgctcctcactgtgggcatccaggctggcggaaggctcatccagcagcagcagatggcacggattgagcagggcacgtgccactgcaatccgctgtgcctggccgacagagagccgcgcggcattatccccgaccactgtattgaccccgtcaggcagcgaatcaataaaatcggtcacataggctttttccatcaccgccgtgatttcctcagcagaggcatccgggcggctcaggcggatattgtccagaatggtctgttccggcaggtgcgggttttgtcccacccagctcagctgtgtccgccagctttccgggctgatatcacgcagctcctgctgattgatccggatactgccttcatacggcagaaagcccagcagcagattgagcagcgaacttttcccggcaccgctctggccgacaagcgcgatacgctgcccggcattcagggtgaaattcagcggcccggccagtttttcccctgacggggcaaaaatcaccagatcggttgcggtgacggcaatctgctctgccggtgccagtggttctgtgcccggcaattcatcatcattgttttcggcggataacagggtaaacagggattccgccgcgcccaccgcctgtgctttggcgtggtaataggtaccgaggtcacgcagcggctggaaaaactccggcgcgaggatcagggcaataaacccggcaaacagtgtgacacccatgccgtagctgccgaaattcagttcaccgagataggaaaaaccaaaataaaccgcgacgacggcaatcgagatcgccgcgaaaaactccagcacagcggaggagaggaacgccatgcgcagcacttccatggtgcgcgagcggaaatcctcggtggcgtcatcaatctgtttcacttcctcacgaccgcggtggaagaagcggatggtttccagcccgcgcaggcggtcgaggaaatcgccgctcaggcggctcagggccaggaagttacggcggttggcatcggcggcacccaggcccaccagtgccataaaaacggggatcagcggcgcagtcaccagcagaatcagtgctgccgcccagttgatcgggaacagcgtgatcagaatcatcagcggaatggtggcggacagggtcatctgcggcagatagcgggaatagtaatcctgcatatcatcaatctgctcgagaataatcgtcgcccagctgcccgccggtttgccttttacccgtaccggcccgagctgttccagtttatccagtactgtccggcggatatcacgcctcaccacctgtccgcagataaacccgacccgttcgcggatcgcggcaacaacggcgcgggcaataaacagtatgaccagtacagtgaacggagtgaggagctgttcgcggggcacgtgctccataatgagggactgaaggaggacagcgaggcaccaggcctggccgataatcagtaaaccgctgagcacacccagcaacatcgagaggcgtaaccatcgccgggccggtgccgcctgaagttttaaccagcggacgagttctgactgtcttgatttatccattttttctgtatgcaggtgataagtaaaaatacggctgaaatcagcaggataatgtcatggtacacgaaaaggcgctacagatatagcgccctgaaaatgctggattatttgctgtctgcgaggctgtcgagatagcgctcggcatccagtgcggccatgcacccggttcccgcagaggtgatcgcctgacggtagatatgatccatcacatcaccggcggcaaacacacccggaacggatgtctgtgttgcattaccgtgcgtgccggactgaacacggatatagccgttttccagatccagatgtccctcaaaaataccggtattcgggctgtggccgatggcgataaagcagcccatcaccggcagctcttcggttgcgtcacttttggtgtcacgcagacggacagcggtcacacccatctggtcgccgagcacttcatccagggtgcggtcagtgtgcagaacgatattgccgttctgaactttatccatcagacggttgataaggattttttcagcgcggaagctgtcacggcggtggatcagatgcacttctgatgcgatattggagagatacagtgcttcttccacagcggtgttaccgccgccgaccactgcgactttctggttacggtagaaaaagccgtcacaggtggcgcaggcggacacaccacggcctttgaaagcctcttctgacggcaggccgatataacgggcggatgcgccggtggcgataatcagcgcgtcacaggtataggtattttccccggtcagggtaaacgggcgtttgctgaaatccacgtcagtgatgtagtcattgatgatttcagtctcaaatttttcggcgtgtgcctgcatacgctccatcaggcccggcccggtcagaccttccgggtctcccggccagttttccacttcggtggtggtggttaactgaccaccgacttccaccccggtaatcagtaccggatttaaattcgcccgtgccgcataaaccgcagcggtatatccggcagggccggaacccagaataattaatttactgtgtcgggttgcgttcatgaacacctcattaacagaatggcaaaaaagcgtgtacaggattgtaggagaaacgaaggggtaaaaaaaggaataaaaacggcagagcacaaaattgaaatcagccggaaatgagtagattttcaggcgattgtacgagaaagtgattattcagaagattcctaagttgtttgaatatcacaccaaaagcacgccctgtttgtcagcgaaacgtttttctgtcattttcttcaacaggttgttctgatttttgttcatttgctttgacaatcggctgcgcatttgcgaaaacatcagtgtaagagatttttatccgtcgggttaatacatcctgttacaccggtgatgtgtttgtcctgatgacgaagcatggtaatttcagcttacgactatagcgataataatctgaatgttccggtaaactggcgccggttgcgtattctaataatcagaaatgcaaagaattggcctgaaaacatgttttccgatgctgattttgttccgtcaggtaagggaagtgttatgggtgtaggaaaatagtaaataagagagataacgagatgattgataacaaaaagcgtccgggtaaagatcttgacagaatcgacaggaatattcttaacgaattgcagaaagatggccgtatctctaacgtcgaactctccaaacgtgtgggtctgtctccgactccgtgtctggaacgtgtgcgccgtttagagcgtcagggctttatcaccgggtataccgcgctgctgaatccgcactatctggatgcctccctgctggtattcgtggaaattacccttaaccgcggggcaccggatgtgtttgaacagttcaacaccgccgtgcagaagctggaagagattcaggaatgtcacctggtttccggtgattttgactacctgttgaaaactcgtgtgccggacatgtcggcttaccgcaaactgctgggtgaaactcttctgcgtctgccgggcgtgaacgacacccgtacttacgtggtgatggaagaggtcaaacaaagtaaccgtctggtcatcaagacccgttaatttgtttcctgcgtcatgtgcaaaacgggataaatcagttacactcctgtttatgcatacagtttcaacgctgagctaccctcagcgttgttccgttttactgacaggaaaaaaccggacgttgcgtcaggaaatgacatgagccaggaatatacagaagacaaacacatcaaattcagaaaaatcagcagcggccgccggttgctggaagccgtccttattgtgatcgggttgtgcgccgtctttctgctggttgctctcttatcgtttaatccgtcagacccgagctggtcccagaccacctggcatgagccggtgaagaatctggccggcagtatcggggcctggtttgcggatattctcttttccgcctttggcatactggcttacaccgtacccccgctgatgattctggggtgctggtccgccttccgcagtaatgaaaataaagattacgtggactttttttcactctcgatgcgtatcatcggggggctgactcttatcctttcatcctgtgccctggcatccctgaatgtggatgatatgcagaacttcgcggcaggcggggtgatcggcagtttattcagctcagcgctgatgccgtggtttaatgccctcggcgcgacactcgcgctgctcagcctgtgggctatcggcctgatgctgctgaccggctggtcgtggatcaccatcgccgaaaaaaccggtgcagcggtcctttccccgattaccttcatcaccaatcattcccgtgaccgttatgacgatcagtattacgacgatcgtgaatatgacgacgaggacgagtattacgacgatgaggaaacggatgagcaggcagagcacagcagcataccgcagacagcggcggctgcagcagctctgaccgctgctgcgcctgacagtgatgcacagagtcagaccgcacagtaccgtgaatacgatgatgcggacgatgtgctgttttccgcaccgaatgcggcggaactggcccatcaggcacattatgaggatccggcggataacagtgacccgctgctgaccccggtacagaatctctcagcatatccggaaaccgccgctgaacctgtggtgcctgttgtgcatgcacaggaaccggctgcacaggaacacagcgcaccggctgcggatgaacctgaacactaccgttttgatgtcccggatgcttaccggacaaccgttgacctgaatgccccgatcaatgtgccggatattcagccggaaccggagcctgaaccggcagcgccgcaatgggaaaacccgtttgcgggaagtggccgtacagaaccggtctttacgttcgacctgcccgatgtgccggataccggtgataacagcagcgcacatctgaactctgcggcagcagcaaccgcagcggcggctttcggtgccgtacaggtcaaacagggtctcggccctgaactgccgcgtccgaatccggtgcgcctcccgacacggcgcgagctttacggcatccgcattccgtctcagcgtgacgcggaacttgagcgtctgcgccgtgagcaggatgaatttgcacaactgcatcagcaggaacatcagactgcacagactgagccggatgaagacgatgtattacaggcgcgtctgcgtgatgaatttatgacgcagcagcgtaaccgctacggcgatgatgagacggacatgtctccggcagcagagccggtgcaggcagtaactgaaccggaaattaccaccggtacgtcctccgcctttatcccggctgcatctgcctatcaggcgcctgtcagccatcactcttttgcatctgcaccgccggtggcggatgttcacccggcggcagaagaagacgatgaagatgagcaggaagctcagcgtcttcaggcgcagtttatgcagatgcagcaacagcgctacagcgggcaggctgacgcgattttatctgatctggccgaactgaaagccttctctccggtggaggatctggtggatccggaaccggcagagccgctgtttatcccgacaccggtcactgcccccgcggcagaaccggcaccggtttattccgcgccgcagaccccggctcagagttttgaacctgttgctgtaccgcagcagaatacggcaccggtcacttcacaggaagcacagttacaaaaacagatggaagagagcctgttccatccgttcctggtccgcaatgaccagccgctgccgaaatcaaccactccgatgccgtctctggatttactggcctcaccgccgggtaccattgagccggtggatgaatttgcgatggaacagacagcccgtctgattgaggcgcggctcaatgacttccgcatcaaagcccgtgtggtcggttatgaaccgggtccggtgatcacccgctttgagctggatctggcacccggtgtgaaagcctcgcgtatttccaacctgtcccgtgacctggcgcgttcactctcgactgtagcggtgcgtgtggtggaagttatcccgggcaagccgtatgtggggctggaactgccgaacgaaaaacgtcagaccgtctatctgcgcgaagtgctggactgcgatgaattccgcgatacgccatcaccgctctctgtggtgctggggaaagatatctccggtcagccggtggtggcggatctgggtaaaatgccgcatctgctggtcgccggtacaacgggctccggtaaatcagtcggcgtaaacgccatgattatcagcatcctgtataaagcgaaaccggaagatgtccgctttatcatgatcgacccgaaaatgctggaactctctgtttatgaaggtattccgcacctgctgacccaggtggtgaccgacatgaaagacgccgccaatgctctcggctggtgtgtggcggaaatggaacggcgctataaactgatgtctgctctcggggtgcgtaacctcgcgggctataacgaaaaaatcctgatggcagacgacatgggacggccgattccggatccgttctggaaaccgactgacagtatggatactacctgcccggttctgaaaaaagagccgtatatcgtggtcatggtggacgaatttgctgacctgatgatgaccgccggtaaaaaagtggaagaacacatcgcccgtctggcacagaaagcccgtgcagcggggatccacctcgtactggcgacacagcgtccgtcagtggatgttatcaccggtctgattaaagccaacatcccgacccgtattgcctttaccgtatccagtaagattgactcacgaaccatcctcgaccagggcggcgcggaatctctgctggggaacggggacatgctctatctgccgcagggtgccaatgcgccgctgcgtgttcacggcgcgtttgtccgtgaccaggaagtgcatgatgtggtgaatgactggaaagcccgtggtcgtccggaatatatcgataacatcacccgtggtggtgaggacggcgaaggcggcagttctgtcagcggggaagatctggatccgctgttcgatcaggcggtacaattcgtcacagaaaaacagcgtgtctccatttccggtgttcagcgtcagttccgcatcggttataaccgggcggcgcggatcgtggaagaaatggaagaacagggcattgtcagtgaaccgggccataacggtaaccgcgaagtactggcaccgtcctcaaataacttttaatgacgccgctgcctgcaaaggcggtgtctgatttatccgaacgcatcatcaggaatgcatacatgaaaaaggtgtttatcacagcctgcctgctggcaggtgtcgcagtcagtgccgcacacgcagatacccgcagtgatcttcagtcacgtctgggaaaagtgaacagtttccatgcgaatttcgcacagaccgtcactgatgctgatggcgcactggttcaggaaggaacaggggatttatgggtgaagcgcccgaacctgttcaactggcagatgagcgcgccggatgaaagtgtgctggtctctgacggcaaaacactgtggttctataacccgtttgttgagcaggtcaccgccacctggctgaaagatgccacacaaaataccccgtttatgctgatcacccgtaacgacccggctgactggcagcagtacatggtgagtcagcgcggtgacagctttgagctgaaaccgaaaaccagcgacggcaatctgaaattatttactatcactgtaactccggacggtattattcagcagtttgccgccgttgagcaggatggccagaaaagcagctatcagctcaaagggcagcagagtactgatgtgaatatgagcaaattcacctttacaccgccgaagggggttacgctggacgatcagcgtcaatgaggcgtcagtgactaacttttctctcgatttttcgcaaaacgattaccagcctctggccgccagaatgcggccggggacactggaacagtacatcggacagactcacctgctggcagagggcaaaccgctgccgcgggctatccgcgccggacagctccactccatgatcctgtgggggccgccgggcaccgggaaaaccaccctggcggaagtgatcggccactatgcggatgcagatatcgaacgcctgtccgccgtgacctccggggtaaaagagatccgtgaagctatcgagcgggcgcgtcagaaccgtaatctggggcgccgtaccattctgtttgtggatgaggtacaccgcttcaataaaagccagcaggatgcgtttctgccgcatattgaggatggtaccgtcacctttatcggtgccaccaccgaaaacccgtcatttgaacttaactctgcactgttatcccgcgcccgtgtttatctgctcaagtccctgtcaccggaagatatcgaagcggttctgattcaggcactgaatgattctgagcgcggcctgggcggtcaaaatatcgtcctgccggatgagacccgcaaactgctggccgaactggtcgccggtgatgcccgccgttcgctgaatgtgctggaaatgatggcggatatggctgaaaccggggctgacggcaaacgtgttctgaccacagaactgctgaaagaagtcagcggggaacgcagcgcccgttttgataacaaaggcgaccgctactacgacctgatttccgcgctgcacaagtcagtgcgcggctcggcaccggatgccgcactctactggtatgcccggattatcactgcgggtggtgatccgctctatgttgcccgccgtctgctggcgattgcatcagaagatgtcggcaatgcggatccgcgcgccatgcaggtggcgatttccgcctgggactgctttacccgtgtgggaccggcggaaggtgagcgggcgattgcccaggcgattgtttacctcgcctgtgcaccgaaaagtaacgctgtttacaccgccttcaaagcggcgatgcgtgacgcaaaagaagggcgggattatgacgtgccggagcatctgcgcaatgcaccgaccaaactgatgaaagaaatggggctcggcaaagagtaccgttacgctcatgacgaaacgaatgcgtatgctgccggagaagtctattttccgcctgaaatgcgtgatacccgctactattttccggtaaaccggggcatggaaggaaaaatcggcgagaaactcgcctggcttgctgagcaggatcaaaatagcccgataaaacgctaccgttaatgccgctgttgcggtaaggtgtgaaatgtaagaataggtaaatggcttaaaacactcagaatgttcatcctgcatacagtgcgggtttccgggcggattaagacgtttcacagttgcgttaataacagccgcactgccggaaagcaggaaaacacttttcgccggttgcatctccgttactgacactcacgttataacaacaagcacaggaatagcatgctcgatccaaatttactgcgtaatgagctggacgcggttgccgaaaaactggctcgcaggggttttaccctggatgtggacacgctgcgcactctcgaagagcgccgcaaggttttacaagttgaaactgaaactctgcaggctgaacgcaactcccgatcgaagtccattggtgaagcgaaagcccgcggtgaagacattgaagcagtgcgccgtgaagtgaacctgttaggggataaactggatgctgccaaatctgcgctggatgaagtgcaggctgagttacgcaccattgctctgaatattcctaaccttccggcagacgaagtgccgtttggtaaagatgacagcgataaccctgaagtcagccgctggggcacacctaagcagtatgatttcgaagtgcgcgatcacgtttcactgggcgaaatgactgacggcctggatttcccggctgccgtcaaactgaccggtgcgcgtttcgttgtgatgaaaggccagattgcccgcctgcatcgcgctatcgcacagttcatgctggatctgcacacagaacagcacggctatcaggaaatctatgtaccgtatctggttaaccacgatacgctgtacggtaccggtcagttaccgaaatttgccggtgacctgtttcataccaaaccactggaagaagaagcggaaaccagcagctatgcgctgatcccgacagccgaagtgcctgtcaccaacctggtccgtgacgaaattctggatgaagctgatctgccgctgcgtatgaccgctcatacaccgtgcttccgttccgaagcgggttcgtatggccgtgatacccgtggtctgatccgtatgcaccagtttgacaaagttgagctggttcagattgtgcatccggaaaaatccatggaagctctggaagaactgaccggccacgctgagaaagtattacagctgctgaacctgccataccgtaaagtgctgctgtgcaccggtgatatgggcttcggttcccgtaaaacctatgacctcgaagtctgggttccggcgcagaatacctaccgtgaaatctcatcctgctctaactgctgggatttccaggcgcgccgtatgcaggcacgtttccgtggtaaagatgataaaaaaccacagctggttcataccctgaacggctccggtcttgctgtcggccgtaccctggtggctatcatggaaaactatcagcaggctgatggtcgtatcgaagttccggaagtattacgtccgtatatgaaaggtctgacacatatcggctgattgccggtcagttgtcactgatctgataaaaatcccgccggtgaaaacctgcgggatttttttatatccgtaaaccgtcacagggtattaaacagtttccgggtcatttcaaaattctcccggcgcagtgacgggatctcatcactccacaacgggttatggggtaccataaagccattacattccagcgtatggatcactgtccgcaaaccctcaatatcgtttgccagcagcatttgcggtaatccgtccggcgatttgggcaggaaaaaggtgacagggaaattggcacccatctcagaaaaagggttagtggcatccatactgtgatgtacggcctctttacctctttcacgaaacaacgctgcattaatctgcgggatcagcgcggcaattctcggtgtgttattaccgagccggggatcttccctctccagtaattcccggcggatagtctcttttgtcgacccgcggcgcagcagataaggccgtttctccgcaaatgcgtctgcactgacatccgggttatgcggaatatcctgactgccgaaatcttcggtgcggggcgccacaatcatcaggtcatagtcagcggtcagtggtttattcagttgcggggaacagagaacacgcaccggtgtatcatctttctgcacatagatagcatataaatcattttcagccggtttcgcggtgaataaatgcagatgaccatgaggcgacttgctttcgagtgtgataaatccgtttttatccggctgatggcgggtaagtaatcccatatcaaccagttcgttaatacgtgaaccggttatttgcagattatctgctgtggcatgtccatcccgcaggcattctgtgactttcctgttcatcagttcagtcttatgtttctgtccgcacagtttactgtaaaactgctcaaccggaataaagccggccatcggcccccagttggcacttttccctttgatagtaaaattttttgtcgggtaaccggcactgataaggccggttgctgttgcctcgacagggcggaaactgatgaccagttgctgctcttcagctaatgcctgaagcggcgcaagatgctctgcagcgatacctgtctgtgaaatgacggtttgccggtctgttatcagccccgggaatgcggctgtggtaccggaagacggccggggggataatgtgtccggcgtactgacagaagcgggtaaggaagatgagcctgtgattctgaacatgtgctgattatccgttattatcaaaaattcaggataaaaaacacacagaaaaaaagtatcacaaaacaaccggaaacaggcataaataagatcaatggctgattttgttttctgtatccggccggtctgtgattatttatacacaatattcagatctaatgttgcattcgcggcaccgggggtaatttccgcagcggtctggcggtaatagcctctgaaatttaaggtcagaataccgtcatttttcactgtgctgacaatcgtattggttttattcagttccagtactttccaggcgccgtcagcggctttatattctgtttcaataccaacgccggatgcagcatctgcggccggagcaatggccagcagactgtttttcccggacacggtagtaccggccggattaataatgaccgggatatccgccggacattccagaacaatatcccagtcagctttatcactgacagaatcaggtttgctgcccagcccgctgttactcagatacacatcattcatttttacattgacagtagatgcagaaactaatgtgcaggaacccggctgaatacggccggatattttataaatagcatcataagcggcggcattaaaagagaaaaacagaacagcaagtatacaggcagatttttttattatcgttaacatcacaaatcccttatttattttccacaacaaatgtcacggatgtattggcttttccggtggtggctttagcggctaactgcttataacgggcgcggaatttcagccggtttgttcctgcctgagtttgttttactgccagaaactgactgattttattggcatctgccgcttcccagcgattagcgggtgcggaaaaatattcaatctgaatggccataccgctggccgcaccggggattttatccaattcaaaggaggtattatcagatgcggcggttccctgaagtgaaccggaaatccggctcatactgctgtggcagttaaaaacaagttcaaattcagtccagtcagtcgtactgccggcaggaaaattactgccgttaccggttaataaccaggttcccaaatcaacattggtattcgtgcttgtgatatcacatgccggtattttaattgttccgctgtaattgacttttacattggtatccgccgccgcacaggatgataaaaacagcaggcataaaaaaacagagcgtatttttttcattattattacctgttatttatagataagggtcattgtcgcctgcgcatttccttccgttgcttttacatcatccgacagctttacatatttaaaatccagatattttgtgatggtctccgcgctgttattaccggtcttataaaacggatactgatgcgctgagccggtttttttatcaccacctaacatgtagggctctgatttttccggttcaaatatctgcaccccgaatcccgggttggtattatgattttcaaggaaaagggtattggtattaatattctctgagtgcagatggtcaccgagtgtaaaatagacattcattccggcatcgcatttcacggtaagtccggcgcgggcgtggccgaaattctcacctacttttaattttctgacggccatcagttcgtgactgccgagatcaacagactgggttttattggagacattacaggtttcggccttctgggtggcgccattactgcgtacggacaattcatccggtatgcctgtgggtgaaccgtaaaacaggcaatgtgccttcaccagactgatctcctgagaaacctttgtcggtaccagtgttttttgggtctttacataaatacctctcatgtcaaatgccgcattcgcgctttgcttatcgagcgagacacttgtctgattttctgtcaccggatgccaggccgatgtgcccttttcacgtatcgcgagtgccacgccgacgccttcaatataggttttaaataccgggtagctttttccgccgtcagacagtgttattcctgtggtgctatagccgttattactgaaacggtaagcatctgcggtcatgcctccggtgcaccttattgaggtgcttaaatcctgccaggaaccgagcgtggtaccggtgggctgctgctgcgcagcactgtcaatcgtgacactggtcatataggcaatatcgtaggcaccggcctgaacagaaaacagtcctgcacacagacagaaaaagaggtgttttgtataattcatcgtaatatctctcaatgacaggtaacagggacaaccggtaaatgttgttcagtctgtgatttggtcagctgataatcagcgcggcactgtttatccgggctgtttccccactgaatgcggatccggcctttttccggcatcccgctgaggtaaacatccccgttttcatctgcgataccggtgctgttgtcgctgccgccattctgttctgaagaggcaaccgcaccaaacggcaccggtgagccgtctttggtaacagtaaagaggatgcggtagccgacatgtgtctgataattgatcataacggcagcaccttttaccggtacaacggtggcagcattcgatttcagctccacattggccggcaggctgctgacatcaagggcaatttcattttttgcataggcattgaggtaaggcacaatcgcatagccccgccagtctgtggatacaccgctgcggttggtcacggcgacattttccgctcccggtgcgcggataatggcaaatgcgtcatacaccggctgtgataatgtcaccccgtaaggatgagcaataatggcgccggttaagccgtaattcaggcgctgtgagtttttatcgtaactgtatccggcattggcgacaccatagctgccgcggtaagaggcagaagcattaccgcccgcgccggtgcctttattggcataggattgctgaacggaataactgaaacggttatcgtcagataagttaccgctgatgcccgccatcatatcgctgcgtccgttactatccgttgtcatcgtggtattaaaggtggcattgctgcccgctgccgtattcaacggaatacttacggaaaatgaaagctggttatccgccttgtgctgccatgcattatcggaatagctgtagctgaggttataactgatcccctcatggctgttgttgtatcccgcactggctgaacgctctttaccggagcggttccggtaatcctgctgataggcgctcaggtaaacactgccgtattcattgagtgactggctgatggttacctgcatgcggttctttttattgtcgcggtacatttccgcacggtttttattggcttcctcaaaggaataatagccatccgtggagtagcggtagcttgccagggtgacggaggtgccggtggtcatcatattctttgaatactgagcacggtaagagcggccgctgtcacgggattctttaccgcgtaactgacgggtggcggcatgggtgacatcggcggaaaatgcaccgaaattacccatgttgataccggttccggcagcataagactgatagttatccgataaaatcgtgccggtgtaggcggtgatccctttcggcaggccgtaaatcagagtgccctgcaaaaaatccggctctttgccttcacctgcggttctgaatttaccgccggtcagggaataacgcagctgtccttcacgctgcataatggcaacggatgagaagggcacaatactggtgcgctctgtgccgtcggcctctttgataaccagggttaaatcaccgttggtacctgtcggatggaggtcattgatttcaaatgcacccggagcgacataggtctgatagataacatagccgttttgtctgacagtgacttccgcattagactgcgcaataccgcggatcaccggggcaaatcctttcgcggcatccggcatcatggattcatcgctttgcaactgtatgccgcgaaactgaaacccgtcaaaaatatcgcccggggtggatgaatccccgataatcaggcgtgattttataaagttaataccgcgttccaggctggtatcgatatttttccattttttttcaccggcactgacggaataggttgagtaattgtttacacgccatgccccgaggttcaggccgctgcgtaaattaagataatgggcatcgctgtccggtgcatggttattaaaattatttgagccgctgtagtaataattcaggataaaggcggtgacgccgttttcccactgagcttcaggaataccaccggcaacggtattattcatggcaatctgcggaacagaaatcagcaggcgctgatgattaatttccggtgtggcggatgcatccggaatatagcggctgatatcggtgatttcctgctccggtgacagcgctgccagctcagggagagcatccgtattaatcccccatgcagccagatcggctttggtcagaaccggtgacaggccattattgtcattattgccggtaaaggtgattgtgcgggtctccgtaataactccatttacaacaacatccacattatattcaccggccagttgtccgccgggcgcggaaaattgatcaagactctgaagatctgcgatattctgcccttcagtcatgctgagtgaattaacgctgaaatagtcttcagcaaacgaaatactgctgcctgcactgaagatcagcgcggtaacggcaatagcaattctgtttaactgaaaacggtatccggcattatcggcattctgataaggcttttcacaggtgaacgtcattgttttaatctctgtggcgtgatgaataataaataactgtccggcggttaatttaatggctgggttttattttctgttattgagccgtaatcattaactgcattccaggtcacgttgtttgcctgaataccgctgatattccatgatgcggttcctttcggcggtaccatgccggaatgttcaatttcggtattaccggcttttaattcaccgaatgacacataataaggtgtcggatttgttgcctgtaatacactgcctttcttttcaaaacgcagttgggtatatgccgtggcggcatctgcggacggtaatccggccgggcggtaaatcagttttattttattattgacggaaatggtcaggttatttgtcgccgcaggatctgatggcggaatagatttcacattcagccagtaaacagattctctgtcttcaggaagtcccggtgtggttaatacaacgcgtatggcattggcggattccggctcaattctgaacaatggtggtgtcacggaaaatggtggtttggccgtatttttgtcatcaaagttattgacccatgactgcaccagataaggtgttttttcatcgtttctgacggtaattgaggcttcttttttattgccttcataaatcacacgggttccgcccagaacaacacttgcatttgccgcagacactgcagtactcagaagaaataacgtgatcagtgattttttcataatgaactccggtaaaaagagggagcagagcccccttcagggaataattactgggtgtactggactgtgacggtaacatcggcatttgcggtacccggggtgaccgtatctgcagttgtcatataacgggcgtaataggttttctggccgcggttatcgctgcccagttcaatgccgtctgcttcagagttcggacggtaaaaagtttcgctggtggcgctgccggtaataccgatgccgacgccggtggcgttatccactttatacagatctgcattgtcatcatgctctgtgccgccgaaggttacgcgggctttacccagggttgccgggcagccgctcagaccgatggtgaacggggtggcttctgttttttcaccggtctttgagaatgcctgtgtcatccaggtgcccagctgtacagtcccttccgttttattttcgttattggtttccacctggcaggtggaatcaataaactggcctttgaaatggatttttccggcggtattgacattttccgctgcggcaaaaacattgccggaaaatgaagcagcaacagcagatgcaattaacagagtctttttaacgcgcattgagaacctcagtattatttaaagtagatttgactatcagctggttattgaattcgggtgtcttgaagtacatattcagcctttcgtttaactcgcaataattgtattgggctttattattcagatctatttaagcggggatgcgctttagtttctgtttaggttgcggattttattatcctgggtattgtgaaatgatgtatttcatggatagatatacttattatttttgaattattgcaatataattccgatgtattgccgttttatagattgcgatgccgtaagataagtaaaacaaaggataaacgaaaaagttaaagttgccggcgatgttatcagacggaagaatatccggggaagcagaacgcggatatgaaaataacagacagggagaacagggggatacaaataaaaacagcacaccggagtgtgctgttaataacaaaaggtatgtgacttaatacatcactttgtgaccatagctttccaggatggatttcactttttccatggtctcttttgacggtggcttaacaccatcaagtttgtattcttcattcattgccgtccatttatgctttcctaactcgtggtaaggcagcagttcaatcttctcgatattcttcatatctttggtgaaatcaccgagaaggtgggcggaatgctcatcatcagaccagcccggcacgacgacatagcgtacccaggttttctgattccgttccnagcgagataacgggcgaactgtaatgtgcggtgattggatacgccgactaaattctggtgaatgctgtcatcgagttgttttaaatccagcataaccaaatcggttacttccatcagctcgtcaatgaccgggtcataacggcggacaaaaccattggtatccaggcaggtgtgaataccttctttcttacactcacggaaccagtcacgcacgaactcagcctgcagtatcgcttcaccaccggatgctgtcacaccgccgccggatgcattcataaagtggcggtaggggaccgcttctttcattaactcgtccacagtgacttcctgaccgtcatgcagatcccatgtatcgcggttatgacaatacaggcaacgcatcagacagccctggaaaaagacgataaaacgaatgcccgggccatcaacggtcccgcaggattcaaatgagtgaatacgacctaatactgacatgacaggattactccaaaactgaccagttataataaaggccccgaaacagaggggccttttagtttatgtcattttaataagacagcaaatggttaccgcacaaattacatggattttgtgaatgtacgggtaataacgtctttctgctgttctttagtcagtgagttgaaacgaactgcgtagcctgaaacacggatagtcagctgaggatatttctcaggattttccattgcttctaacagcatttcacggttcattacgttcacgttcaggtgctgaccaccttcgatgcttgattcgtggtggaagtaaccatccatcaggcctgccaggttagtacgacgaacatcgtcatctttacctaatgcgtttggtacgatagagaaggtgtaagaaataccatctttcgcgtaagcaaacggcagtttagcaacggaagtcagagaggcaacagcacctttctggtcacggccgtgcatagggttagcacctggtccgaacggagcgcctgcgcgacggccgtctggggtgttaccggttttcttaccatacacaacgttagaagtgatggtcagaattgactgtgtaggaaccgcgttacggtacatgtggtgtttctgaattttcttcatgaaacgttcaacgatgtcacatgcgatgtcatcaacacgggagtcgttgttaccgaactgcggatattcgccttcgatttcgaagtcaacagccagaccgttttcgtcacgaaccggtttaactttcgcgtatttgattgcagacagggagtccgctgcaacagacagacccgcgataccacatgccattgtacgatatacatcacggtcatgcagagccatcagcgctgcttcgtagctgtatttgtcgtgcatgtagtggatgcagttcagagcggtgacatagttagttgccagccagtccatgaagtgatccaggcgatccataaccagatcgtaatccagaacgtctgctttgattgcttcagttttaggaccaacctggattttcagtttctcgtcaacaccgccgttgattgcatacagcagggttttagccatgtttgcacgggcaccgaagaactgcatttgtttaccgacaaccatcgggctcacgcagcatgcgattgcgtagtcatcgttatcaaagtcaggacgcatcaggtcatcgttctcatactgtacagaagaggtatcgatagacactttagctgcataacgtttgaagttcagaggcagtttttcagaccacaggatggtcatgtttggttccggtgaaggacccatggtgtacagggtgttcaggaaacggaagctgtttttggttaccagagtacggccgtcggtacccatacctgccagagattctgttgcccagattgggtcaccggagaacagttcatcatactcaggggtacgcaggaagcggaccatacgcagtttcatgatcaggtggtcaacgatttcctgagcttcaacttcggtaattttgccttgttccaggtcacgctggatgaacacgtccaggaaagtggaaacacggccgaaggacattgcagcaccgttctgagacttaacagcagccaggtagccgaagtaagtccactgtgcagcttcctgtgcgttagttgcaggaccggagatatccagaccgtatttggcagccatttctttcatctggcctaatgcacggtgctgttctgaaatttcttcacgcagctggatagtttcacgcagatcttcgccgctttctaatttagcctgcagagaagtgaactgtgcgaatttgtctttcatcaggaagtcgataccgtacagtgcaacacgacggtagtcaccgatgatacgaccacggccgtatgcgtcaggcagaccggtcagaacaccggatttacggcagcggatgatgtccggagtataaacgtcgaacacgccctggttgtgagttttacggtactcagtgaagattttttcgacttgcgggttcatttcgcggccgtaggctttgcatgaaccttcgatcatacggataccaccgaacggcagcattgcacgtttcagaggtttttcagtctgcagaccaacaactttttctaaatctttgttgatgtaaccggcatcgtgagaagtgatagtagacggcagatcagtgtcaaaatcgataggagcgtgggtactgttttcgattttgatgccttccataactttcgcccacagagcagttgttgcatctgtagcgcctgctaagaaagactcatcgccttcatatggggtgtagtttttctggataaagtcacggacgttaacttcctgtgaccagtcacccagattaaagccttgccatgctgaagcgaatttttcatttaattctgacatgatactttaccttttaacaatggaacttagaaattcagtcgtgataaacagagattaatgcttctggtcaccgcgtaaatgaatcagccaataagtcagacctactaaaactgcaccaccaataatgttgccgatggtgaccggaatcaggttgttaatcacgaaatcagaaactgtcagtgacggaaactgttcaggcgacgaaccaaccatagtccagaattcagaaggtgcaaaatttttaatcgcaatccccatcgggatcataaacatattggcgatactgtgctcaaatccgctggcaacaaacataccgataggtaagactaaagctaaaagtttatcggtcagactacggcctgcgtagctcatccataccgccagacaaaccattaagtttgccagaatcccgagacagacggcttcaataaaggtgtgatgaagcttatgatccgctgtttgcaggatatttaatccccacagcccgttggctgccatatactgtccggcgaaccagatgagggcgacaaagaagagggcgccgaccaggttaccgaaatacacgcgggtccagtttgcaaacatctgtccccaggtgatacgcccggtggcttttgccacgctggttaatacggtggaggtgaataagtcagccccgcaaaccactaccagcatcagaccgagcgagaaacataaaccaccgataagtttagcgataccaaaaggcactatgcctgcggtaccggtggtggctgtaatataaaagacaaaacctactgagatgaaaattcctgccatgaatgcagataagtatgtgatgtgaggggctttcgttgctttatagacacccacatcgtctgcaacatgtgccatatcggcaggagataataaattaaaaagtgcgtcagttttcataatgctaactgtctcttgattccaaataattatagcacgcaatgatagtaacaaagggtgaaaaaattaaacttgatgtggatcataaaggcgttcaagagaatcgtcaaataccctgaaaaaagttgaaaaatcaatgtaagtttatgtatataaaggaaaaacaattttttaaaaattgtaatatatttttattttttgttttttatttaattaaagtaaaaaatcaggttaacttgtcgtttttgtgttacttaaaacgaacaaattaacctaatatttacgtttattgctatttacgacgattaaatcgcatttttatcgtttggccaaaaatgcgcttttgctttttgcagtttttcataagctgccagcagtgcctgatgagcaggaaatgccgttaaattattatctgatgcacataacccgaagaaacaatttttgccgttcagggcatccagcgccgcattcagggtttcctgaccatacatacgggcaaacgccggcaggtactgttctgtgtcgcgctccggctcctgcgttaacagcagcagggtatgcagacagcggtaatagtttgctcgtgcggcactgagcacactggcgttgaagtcctgtgtccactccacccaggccagcgcctgatcggtatcaccaccggccagtgccagcatggatttcagctcaccgatgcgcggggtggcccagccgttatctttaccggcggcaatgcccagcaattcacggacacgggtaaaatcgtcatggccttcttcatccagctgcgccagcagagagagataatcttcctgacggtaacggctttccggcagcgcgagaatggtttcacgcagatgaatacccatggcgttattggccatatgcaaatcttccaccggatagatatctgacatgcccggcaccaggatacggcaggcatacacaccgagatgctcgtaatcggcgatatacacttcgtggccggaggccgcgaactgtgccatcagtgtggtgaattcttcttcggtggtgccgcggaactgccagtcagcgaaatcataatccgcatcctgtttaaacagatcccagctgatcaggccgcttgaatcaataaagtgggtttccaggttggtctgatccgccacttcctcatcatcaaaggtcggtgcggtgaaaacatcgaggtctttcaggccgcgtccctgtaacagctcagtgacagtccgctccagtgcaacaccgaaatcaggatgagcgccgaaagaggcaaaacaggtaccgttggctgggttaaacagcaccacacagatgaccggatactgaccgccgagagaggcatcaaaacagaagatcgggaaaccttcgctttccagggtgcggattgactcagtgacctgcggataacgcgccagcacctcttccgggatcgccggtaagctgatgcgctcagcaataatgcggtttttcacataacgttcaaagacttccgataatccctgcacgcgggcttcattgcgggtgttcccggcggacatgccgttggacacatacaggttggcgacgatattcatcggaatatacaccgttttgccgtcagactggcgggtaaacggcagggcgcagataccgcgctcctcattggaggattgcagatcaatcagctgactgccctgtaaatcattttccggatcataataatcgcgcagatactgatcgagaataccttccggcagcgagtcgtcgtctgtcagcgggaaccatttctcatctggatagtgaacaaactccccgttggcaatggtttcgcccagccagaaatcggcaaaaaagtagttggtggacagacgctcaaaatactcgcccagcgcggaggccagcgcggcttttttcgtggcccctttgccgttggtaaagcagagcgggcagtcagtatcacggatatgcacggaccagacgttcggcaccgggttgagccacgaggcttcttctatattgaaacccagttgctgcagtttctgctgaaaacggctgatggaatcttcgagagcggcatctttgccgggaataaaagtatgtgtttgcgtcatgggatccacaattgctgtaacggcccgctgcacgcggactcaggaataccggggaagaaaggcgcacataatacggatttttcgtgtcagcggctacctttgtgaatgtaaagttactgccgggttattccgctgtatttccgctgtccgccacgcatctccggaaatacattatataatatcccggtatgatggtcagctgtagtcagatattctgccgggcggcaaaaagggtttaccgcccatcatgcaataagcgttgcagcgaagggtggggagtgataaaaccgacagacagggcgtattcatatgatggatatacagggcattaatttacagatagggtgaggtcaatgagtcaggtatacaactttagtgccggtccggctatgctgccggtagaagtgctgcgccgtgctgagcaggaactgtgcaactggcgcgggctcggcacctcagtcatggaaatcagtcaccgcagtaaagagtttatgtcggtggcaaaggaagcggaaaataatctgcgccagatcctcgcggtgccggataactataaagtgttgttctgccacggcggcgcacgcggacattttgccgcactgccgatgaacctgctgggtgagaaaaccaaagcggattatgtggtgggcggatactgggcggaatgtgcggcagaagaagcaaaaaaatattgcacaccgaacattattaatgtcagaaccgaatcggaagacggtatcggcgtgaagccgatgagcgaatggcagctcagtgatgatgcagcctatgttcactactgcccgaatgaaaccattgatggtatcgctattcatgaagagccggattttggcgataaaatcgtgattgcggattactcgtctgccatcctgtcaaaaccgctggatgtcagccgtttcggggtgatttatgcgggcgcgcagaaaaatatcggcccggccgggctgaccctggtgattatccgtgaggatctgctgggcaaagcgcgcagagaaaccccgtccatccttgactacaccgtactgagtgaatgcgactccatgttcaacaccccgccgacctttgcctggtatctctccggtatggtctttaagtggctgattgaacagggtggtttacaggaaatcgcccggatcaactatgataaagcacaactgctttattcagcggtggatcacagtgatttctatattaaccgtgtggcggcggccaaccgttccctgatgaacgtgccgttccagatgtctgatccgtcactggacagcaaattcctcgccgaagcacaggcacagggactggtctccctgaaagggcacaaagtcgccggcgggatgcgcgcctccatttataatgcgatgccgtatgaaggcgtgcgcgcactggccgaatttatggcggagtttgaaagccgtcacagctgattttttgcagacatttttccgggaccgggtaagcatccggccccgtttttcgtttttatgtttacacaccggagaataacttcgtatggattccctgacgttacaacccatcgcccgcattaacgggacgattaacctgcccggctccaagagtgtctccaaccgggcactgctgctggcggcacaggcagcgggcacaacacgccttatcaacctgctcgacagcgatgatatccgccatatgctcagcgcactgcgggaactggggatccgttatcagctttctgacgacaaaaccgaatgtattgtggaaggtcagggcaaaccgatcagcggatttaaaggtattgagctgttcctcggcaatgccgggacggcgatgcgcccactgacggcggcactgtgtctcggggataatgatattatcctgaccggcgaaccgcgtatgaaagagcgcccgattggtcatctgaccgatgcactgcgccggggcggcgcacagattgatttcccggaaaatgacggttatccgccgttgcggatccgcggtggctttaccggcggccgcatcagtgtggacggttccgtatccagccagtttctgaccgcgctgctgatggcagcaccaccggcagagcatgacaccgaaatcactatcagcggtgagctggtctccaaaccgtatattgatatcacgctggcgatgatgtccacgtttggtatcacggtggtgaatgaagattaccggcgtttcctgatcaaaggaaaacagcagtatcagtcccctggagaatacctggtggaaggagatgcttcatccgcctcctatttcctcgcggcggcagccattaaaggcggcaccgtgcgggttaccggcatcgggcgtaacagtctgcagggcgacacgcaatttgccgctgtgctggaaaaaatgggtgcgaaagtgacatttgcggacacgtatatcgaatgcagccgcgatactctgcacggcatcgatatggatatgaacgccatcccggacgcggcgatgacgattgccaccaccgcgctgttcgccgaaggaacaaccactatccgcaatatctataactggcgggtgaaagagacagatcgtctcagcgcaatggcagctgaactgcgtaaagtcggcgcacaggtggaagagggacatgattacattcaggtcaccccgccggcaaaactgcagcatgcggaaattgaaacctacaacgatcaccgcatcgccatgtgtttctcgctggtggcactgtcagatactccggtcacgatcctcgatccgggctgtacggcaaaaaccttccccggctacttcagtgagctggcggcactgtcagaataaaaaaacgccgttctgcgcgcagggcgtttcctctgctgtcacagatgcgtataatacgggcatcttttttcaggcggccgttgtgacggccgccggactgcgacaggagagcgcgcatggcagtatatgttccggtcattaccattgacggcccgagcggcgcgggcaaaggcaccctttgtcacgcactggcaaacgaaatgggatggcatttactggactccggcgcaatttaccgcgttctggcactggcggcactgcatcatcatgtggatatcacctcggaagatgcactggttccgctggcggctaatctggatgtgaaattcctggcaaaagacaccggtcctgagaccattctggaaggtgaggatgtcagccgggctatccgtcaggaagaagtgggtatgacggcctcacaaatcgcggcgttcccgcgtgtccgtgaggctctgctgcgccgtcagcgcgcattccgtgtggcgccgggcctgattgccgacggccgcgacatgggcacggtggtgttcccggatgccccggtgaaaattttcctcgacgcgagtgcgcaggagcgtgctcaccgccggatgaagcagttgcaggacaaaggctttagtgttaattttgaccgccttcttgctgagatagaagagcgcgatttccgcgaccgcaaccgtgcggttgccccgctggtggctgccggcgatgcgctgattctggactcaacaaccatgtcaattgacgacgttattgccgaagcccttcgttatacgaaggaaaaactggcagaaacggcggaatgataaacaaaatttgcggaaattctgactgaaaacgtgttttttagtaggtttctgtattcgtttttgtttataatgttaagttgaagttttttaccggcagagaacaaggcaaagaagcagttttctgccacccctttgtgacaaggaatgttgcaaggtatgtgaaacaaccccattcggccggatgctaaatggacgttaatacttaaacacttgaagatcaaacatgactgaatcttttgctcaactctttgaagaatccctgcaggctatcgaaacccgtccgggcgctatcgtccgtggtactgttgtcgctatcgataaagacgtagttctggttgacgcaggtctgaaatcagaatctgctatcccggtagaacagttcaaaaatgctcagggcgagctggaaatccaggttggcgacgaagttgatgttgctctggacgcagtagaagacggtttcggtgaaactgttctgtcccgcgagaaagcaaaacgccacgaagcatggctgatgctggaaaaagcatacgaagaagctgagactgttaccggtgttatcaacggtaaagttaaaggcggtttcactgtcgaactgaacggcatccgtgcgttcctgccgggttcactggttgacgtgcgtcctgttcgtgacaccacgcatctggaaggcaaagagcttgagttcaaagtaatcaagctggatcagaaacgcaacaacgtggttgtttcccgtcgtgcagttatcgagtcagaaaacagcgcagagcgcgatcaactgctggaaaacctgcaggaaggcatggaagttaaaggtatcgttaagaacctcactgactacggtgcattcgttgatctgggcggcgttgatggtctgctgcatatcactgatatggcgtggaaacgtgttaaacacccaagcgaaatcgtgaatgtcggcgacgaaatcactgttaaagtgctgaaattcgaccgcgaacgtacccgcgtatctctgggcctgaaacagctgggcgaagatccttgggtcgcaatcgctaagcgttaccctgagaacacccgtctgaccggtcgcgtgaccaacctgactgactacggctgcttcgttgaaatcgaagaaggcgttgaaggtctggtacacgtttctgaaatggactggaccaacaaaaacatccacccatctaaagttgttaacgtgggtgatgttgttgaagttatggttctggacatcgacgaagaacgtcgtcgtatctccctgggcctgaagcagtgcaaatctaacccatggcagcagttcgcggaaactcacaacaaaggtgaccgcgttgaaggtaaaatcaagtcaatcactgacttcggtatcttcattggtttagatggcggcatcgacggtctggttcacctgtctgacatctcctggaacgttgcaggcgaagaagcagtacgtgaatacaaaaaaggcgacgaaatcgcagctgttgttctgcaggttgatgcagagcgcgagcgtatctctctgggcgttaagcagttagctgaagatccgttcaacaactacaccgctgttaccaagaaaggtgctatcgtcaccggtaaagtaactgcagtagacgctaaaggcgcaactgttgagctgatggatggcgttgaaggttacctgcgtgcatcagaagcttcacgcgatcgcgttgaagatgctactctggttctgagcgttggtgatgaagttgaagctaaatacactggtgttgatcgtaaaaaccgtgtaatcaacctgtctgtacgtgcaaaagacgaagcggatgaaaaagacgctatcgctactgtgaacaagcaggaagaagctggcttctctaacaacgcaatggcagaagctttcaaagcagctaaaggcgagtaattaagcagcagcaggccgcgcaagcggtctgcttttatgataatcagggtagtccaggaggttatatgaccaaatctgaactgattgagaagctggcaggccaacaatctcatcttccggctaaagttgttgaagaagcagtaaaagagatccttgagcatatggcaaatacgcttgctgacggcgaacgtattgaaatccgtggattcggcagtttttctctgcactaccgtgcaccgcgggtaggtcgtaacccgaaaaccggcgaacaggtggaactggaaggtaaacacgttcctcacttcaaaccgggcaaagagttacgcgaccgcgcaaatatctatgcttgattattgacagagataataaaaatgacgccaccggcgtcattttttttgcagcaaacattaaattatcattattataaaaatgttaatattatattaataaattatggttgtgtaaggttctggtgttggcaagttgaattcgtttattaataataggttaccggagacatcatattcagttcgctataaaatactattggaaattagacagtatttataattaagcaaataattgtgagttgactcgcataaaataattgattacttgtatgtctgaaatataaattcgtgacgacacgcatttttctattatcgtaataacacgtgatacccgccataacataataccggcctgtttaccttcccggtgagtaatatgtctgttatggctgtgatgaaatatctgtttccccgtccgttgccgctctggcttgctgcggctgctgttgtgaccgggcatataccgctgttgctgatatcgcggttgttgttaccggcagaaagtctgttgttattcactggtatttgtttgctttttcttatccgcaccaggctgagtttttttatcggcattgttgccggtacttttctggcagtaaatattcatatcagtaatacattatcactcttttccgctgaatcacccgataatatcgatattatgatctatgatgtcatggttaattcatctgactattattccgtcagagggcggattattaatataaataataaaatgtatgatgatactgtttttattaatataaaaataaaaggttcatttaaaccggcatgttccggtgaagtctggcgtatatttcgtcctgtactgaggccggtacacggtcagttaaatgaaggacagtcaaaccggcagcaatatttactgtcagagcgggttttgttttctctgacgtcgggacgcagtgaaaaactatcttcagactgcagtcagcgtcagaaaatgattgcggcatatcttcctgcgatggatgacctgccacatacaggactgatggcggcgctgttatttggcgagcggcgcggcatcaccgcagagcagcgcagactggtgcaggaaaccggagtggcgcatgtggtggctatttcagggttgcatatcgggctggcggcgttatggggctggtgggccgggcggttattgttgctgctgttaccgctgcgtgtgatgacacctgttattccgtctgtgctgtcagtttgtgccgctgttgcctatgtctggctggccgggtttgcggttccggcctgccgggcattgtctgcgctgctgttgtggcatctgctgcgctggcggcattaccacctgccggcgtatcagtttgttgtgataagtgccgcactgttgctgctggctgacccgctgacaattttatccgccggattctggctgtcttatactgcggttaccgcattgctgttctggcatcacaccggcgttttctcccgcagtaatgtattcatcccactgacaccttttgcccgcctgtggcgcaatatccgttcgcttctctcttaccagtgcggattatttctgttactgctgccggttcagggatttttcttcggcggcgtgaatatgctgtcgtttctgagcaatctgtgggtggtaccggtgatctcctttctgacggtgccactgctgtttgccgggttattgatcgggcctgcactgccgctggcagatttctctctggcgctggcattatggccgctgccgtttctggcacaaggctggatggttaccgggcatatcgctctgatatggataccactgatgtgggcggttgtttatatcattcggctggatatgtggcagcagcacccgctgctgctgccgggaatggtgttcagttgctgtctgtatctgcggaaaactccgctgcctgaatggtcggttaccgtactggatatcgggcacgggctggcggcggtggtgataaaagacggcagggcggtcgtgtatgataccggcaaccgcttcgggacacgggatgacgggctgcgcacagtgttgccttatctgcgttatcaccgcctgactccggactggattatgattagccatgaccaccgtgaccacaccgggggactgggctctctgcgcagtgcttatcctgccgcagtggtcaaaggcaacattccgcaggccgatacaccctgccgccgcggggagcgctggttatggcagtcattgtattttgaggtgttatggccggatgaaaaatatcagctgagcaaaaatgacggctcctgtgttatccgcatcagtgacgggaaacatcaggttttgctgaccggggatatcgaaaaacaggcagaaaaacagctgattaagtataaagatgaactctccgccaccgtactgcaagttccgcaccatggcagcaaaacctcctcatcagaattttttattcgtgcggtaaatcccgctttcgcactggtttctgttgcgcgctatagcccgtggcgtctgccttctgataaagtacgccgtcgctatcataatctcggcgtgcagtggcatgatactgcgcacagcggccagatttctgtgtccttttttgctgatgaggtatccgtcgcgacttaccgtacccatctctccgcccgctggttcagcgcatggtttggagatcagccggtaaacgggtaatataggcagctaatttttagtattggtaaacgcaataatgaaagatattgatatttcaacccggcaaacattccgccggttatggccgacaatcgcaccgtttaaaacaggtatcatcgtggcggctattgcgttagtcatcaatgcgggcggcgatgcctttatgctgtcgctgctgaaaccgttgcttgatgaaggtttcggcactgccgacaatgattttctccgtatcatgccgctgattatcctggggctgatgctgttacgcggtatctccagttttgtttcaggttactgcctctcttgggtgtccggtaaagtggttatgaccatgcgccgtaacctgttccggcatatgatgggcatgccggtttccttctttgatcagcaatccaccgggacactgctttcccgtattacctatgattccgaacaggtggcttcgtcttcttccggtgcactggtaacggtcgtccgtgaaggcgcttatattattgcgctgttcgggctgatgttttacaacagctggcagctgtcgctgattctgatcgttattgccccgatcgtggcctttgttatccgcaaagtctctgtccgcttccgcgaaatcagtaaaaacatgcagagcggtatgggacaggtcagcgccagtgctgaacagatgctgaaagggcataaagaagtgctgattttcggcggtcagaaagtggaaaatgatcgctttgataaagtcagcaaccatatgcgccgccagggcatgaaactggttaccgcatcatctattgccgacccgattattcagatcattgcctcctttgcgctggcatttgtgctgtttgccgccagtttccctgaaattaaagaagcactgagtgccggttccattacggttgtcttctcctccatgattgccctgatgcgtccgctgaaatccctgaccaacgtgaacgcccagttccagcgcgggatggcggcttgtcagacactgtttgttctgcttgatatggagcaggaaaaagacaccggcaccaaagtgctgaaagatgccaaaggtgatgtggcgtttgagaatgtcactttccgttatcaggggaaagagaatccggcgctgaaaaatgtgtcattcactattccgtcaggcaaaacggtggcgctggtcgggcgctccggctccggcaaatccaccattgccaatctgatcacccgtttctatgaaatcgaaagcggacatattacgatcgacggcaacgatatccgtgattacacactggcatcactgcgcagtcaggtggcgctggtgtcgcagaatgttcacctcttcaatgatacggtcgcgaataatatcgcttatgccacagaaggtaagtacacccgcgagcagattgaaaaagccgctgaaatggcttatgccatggactttatcaataagatggagaaggggctggataccgaaatcggtgagaacggtgttctgctttccggtggtcagcgccagcgtattgcaattgcccgtgcattgctgcgtgacgcaccgatccttatcctcgacgaagcaacctcggcactggatactgaatctgagcgtgcgattcaggccgcgctcgatgagttacagaaaaaccgtacctgtctggtgatcgctcaccgcttatccaccattgagaaagcggatgaaatcctcgtggtgcaggacggcgaagtgcaggagcgcggtacgcatgatgaactggtgaaacagccgggtatctatgcacagctctataacatgcagtttggtcactaagcggcactgctgatgatcgataagatttggtccggccgctcaaagctttactggctgcttctgccgttctcgtttttgtacggggcggtgagcggtctgcggcgtctgctgttccgctgcggactgaaaaaatcccgccgtatgccggtgccggtggtggtggtcggtaatctgaccgccggcggtaacggtaaaacaccggtggttatctggctgacagagcaactgctggcccggggctatcgtcccggggtggtttcccggggttacggcggtaaatcagatcattacccgctgcttatcacgaaagacactacgacagcacaggccggtgatgagccggtgctgattgcccgccgtaccggtgtgccggttgcggttgcgcctgacagggcggcagcggtaggggctattttgcagcatgcaccggtggatgtgatcatcaccgacgatggtttgcagcattacgcactgcagcgcgatatggaaatcgtggtgattgacggcgagcgccgtttcggcaatggctggtggctgcccgccgggccgatgcgggaacgggcagggcgtttgaaacaggtggatgcgatgatcgtcaacggcggtaccgcgcaacccggggaaaccgctatgcagctggtgccgggagaggctgttaacctggctgacggcacccgtaaaccggcggctgaaatcggtgagtgtgtggcgatggccggtatcgggcacccgccgcgtttttttgccacgctgaactccctcggcgtgacaccggcacagtgtattgcgtttccggatcaccagtcttacagccctgaacagctttccgcactgataaaacccggccagtcactcctgatgacagagaaggatgcagtgaaatgttttgccttttctgcaactgactggtggtatttaccggtcagtgccgccattcccgcaaaatccgccgatttaattctggataaagtcatatctcacataaaaaatgcataaagggacttgcgctttttatctgaatatggcttaatcaaaaagttgtatttctgtgatgtatttcatatctcactgtgcaaccaatccgcgtgtcaacacatattctgatcccgctgtcataattttttcacaccaccttgttaatcttgtggtgcggatgaccggatcccgcggataaacggtatgttttgcagcaggtgtctgaccggctgcaaatcagaataaaaaataataactataatgttttgctcattaccgggtggctgttcgcaaagagagcacccgtgttgcccggccggagcagacataaccagcgatggggtgtataccattcctggtgatataaaaggagttaatactatgtctaaacaattacaacttggccgcgttaaatggtatgacgcgaaagaaggttacggtttcatctccccggttaacggcggcgatgatatctgggtaacccgtaacgggatcgccaattcccgtaacaaattactgtgcgaagggcaggaagtggaattctcactgacccgcggcagttatggtattgcagcgaacgatgtgatcgcgctgtaatatgggtaaaaacgcgattatctcagtgatatcgcaacaacagagttaacggtgagaccgggcttatgttattctgagccaacgtttttatctcattgggggacgtatggatcaccgtttactcgaaatcgtggcctgccctgtttgccacggcaaactcagctacgacaagcaaaatctcgaactcatctgcaaaggctgccgtctggcctatcccgtccgcgacgatatccctgtcttattagagaatgaagcccgcgaattgccggtctcagaaggataatctccatgtttacagttatcattcccgcgcgttatgcctccacgcgtctgcccggtaaaccgctggcggatatctgcggcaagccgatgattgtccgtgtgatggagcaggcaaaacgttccggtgccgcgagagtcattgtcgctactgatacacaggcggtatttgatgccgtgattgcagagggcggcgaagcctgtatgacgcgcgaagatcatcagtccgggaccgagcgcctggcggaagtgattgatcactaccggtttgctgatgatgagattatcgtgaatgttcagggggatgagccattaatccctgacagtattattgcgcaggttgctgaaaatctggcagccagcgaagccggtatggccaccctggcggtaaaaatcacctcagcggaagaagcctttaacccgaatgcggtgaaagtggtgatggataaacagggctatgcgctctatttctcccgggccaccattccgtgggatcgcgagcgtttcatgcacagccgtgacagcgccggtgataatttcctgcgccatatcgggatttacgcctaccgcgccgggtttatccgccgctatattcagtgggaaaccagcccgctggagaaaatcgaaatgctcgagcagctgcgtgtactctggtacggtgaaaaaattcatgtcgcagaggcatccgaagcaccgggcaccggtgttgataccccggaagatcttgaaaccgtgcgcagattgtttgccgcccgctgagaaatatcagtcataaacaaaaacgcgggtcacttctgaacccgcgtttttgttgtcttctattcctgtccttcattatctgacgattttactgactgccagagccgccccagcccttcataccagacccgctcactgtgtgatagatagtacgcggaaggaatggttttttcccagctgtgcagcggggtggtgacggccagctggttagccggtgccgggatagggtgcaggccgcgcgcatcaaagaaggctttggcgcgggtcatatggttagcggaggtcaccagcaggaacggtgcatcacccaccacttttttcacttcggcggcttcctcttcggtatctttcggcagcaccagcggcagtgtgcgttcagcagggatccccagtgactgcgcaacttgcgctgcggcctctgcgctgctgatactgtttgcgcccggcccgccggtgaaaatcagcgtcgcctgcgggtaacgcagtgcaaggcgcacaccttcggtgacgcgcggcagactgttactgatcaggttggcggaaggtgaccattccgggttataggtaaagccgccgccgagcaccacgatatagcgcagttcctgttgctgaacttctgccggggtaatgagctcataacgtttttcatacggtttttctgttgtcagcagcagagcatccgccaccggttgcaggctgagcagcaccagcccgagccagctcacggtgatcagggttttaccggttttctgccatcgggaaaaccacagcagcagtaatccggccaggatcagcaggagcataaacggcagcggcatcagaaaaccgccgaggtattttttcagggcaaacagcatgagcgcaccttaaatatgattgatttatcaccggttaacggcaggaggctgcacaaatcgggtgacattagacacgtctgtgacacaatagttaccgactttgcatattgcactgctctgcccggcaatacaattgaagatagccggattgcgcgggaaaccgccgcagactgacccgaaatatcccccggaactgaacacaggttttcatggttgatcgtaattttgacgatatcgcggagaaattcacccgcaatatctatggcacaacaaaagggcaaatccgcgaagcggtggtctggcaggatctggacgccttactgacccggctgaaaccgggtccgctgcgcattctggatgcgggcggcggtgacggttttttctcccgccgtctggctgcgctggggcatcaggtggtattgtgcgacctgtcagaagagatgattgcccgcgcacaacaggccgcgctggatgacggcgtggcagaaaatatgtcctttattcattgtgcggcacaggatatcgcacttcacactgaaggggcgtttgatctggtattatttcatgccgttttggagtggatcacagatcaaaaaggtgcaattgaagcactgaccgctataatagcgggcggtggtgcattatcgttaatgttttacaatgcgaacggacttgtgatgcgaaatgcgatattaggcaattttcatctggcaaccccggaaattcagcgccgccgcaagcgttcgttatcgccgcagaatccccttatgccggaacaggtttatcagtggctggatgattgccgtctgacgattgaggcaaaaaccggcgtgcgggttttccatgattatctgcagagccgccagttacaaaaccgtgatttcccggcgctgctggcactggagcaacgctattgccgtcaggagccttatatcagcttaggccgctatattcacgttatggcacgaaaaccgatcagaaggatggacaatgagtgagtttacccaaacagtcccggaactcgtggcatgggcgcgaaagaatgatttctccatcgcgctgccgccggaacggctggcttttttactgtctgttgcggtgctcaacagtgagcgcatcgacggtgaaatgagcgagggggaactggtggatgccttccgcgaagtctgcaaaggctttgaacagacaacggaatctgttgcggtccgcgcgaacaatgccatcaatgatatggtgcgccagaaaatatttaaccgctttaccagtgatatctttgagggtaatgcgatttaccggctgaccccgctcgggatcggcatcagcgattattacatccgtcagcgtgaattttcctcactgcgtttatccatgcagctctcgattgtggccggtgaactgagccgcgcggcagatgccgccgaagagggcggggatgaattccactggcaccgtaatgtgtttgccccgctgaaatattccgtggcggagatcttcgacagcattgatatgtcgcagcgcgttatggatgagcagcaaaacggcgtcaaagacgatatcgccaaactgctgaatcaggactggcaggccgcgattgccaactgtgaacagttgctgtcagaaacctctctcacactgcgggaactgcaggatacgctcgaagccgccggtgacaaattacaggcgaacctgctgcgtattcaggatgccaatatgagtgccgccaccggctccgaactggtggataaactgatttttgatctgcaggccaagctcgaccgcattatcagctggggccagcaatctattgatttatggattggttatgaccgccatgtccataaatttatccgtaccgctatcgatatggataaaaaccgtattttctcgcagcgtctgcgccattctgtacagcactattttgactcgccgtgggcccttaatgtggctaatgcggatcgcctgctggatatgcgtgacgaagagatggcactgcgtgatgacgaagtgaccggggaattaccgccggatctggaatatgaagagttcagcgaggtcaacgaagagcttgccgccatgatggaaactgcgctggctgtgtataaagcacaggcgaagccgctggatctgggctcggttctgcgtgattacctcgcgaaatatccgcgcagccgccagttcgatgtggcacggattatcgtggatcaggctgtccgcctcggggtggctgatgctgatttctcaggcatcccggcggaatggtcagtaattaatgaatacggagcgaaggtgcaggcacatgtcatcgacacatattgaacaatttatgtcagcaaagctggctcaggcacttgccaataacctttttccggaacttgacagccagttgcgcgcaggccgccatatcggtgtggatgatctggacaatcatgcctttctgatggatttccaggatgaactggaaggcttttacgcccgttataacgtggaactggtccgtgcaccggaagggttcttctatctgcgcccgcgttccaccacactgatcccgcgctcggtgttatccgaactggaaatgctggtcggtaaagtgctgtgctatctgtatctcagcccggagcgtctcgccaaccagggtattttctccacggcagagctctatgaggaactgctgtcactggcggatgaagccaaattactgaaagtggtgaataaccgctccaccggctctgacctggacaaacaaaaattactggaaaaaacccgtggtgcgctgaaccgcctgcgccgcctgggcatgatcacgtttgtctctgcggataacagccagtttgtgattgccgaatccgttttccgcttcggggcagatgtccgcagcggggatgacccgcgtgaggcgcagttgcgtcttatccgtgacggtgaggctcagtccctgacggaagatgaaaaacacccgcgccctgaggatcaggacgatgataatgaagaatctgataatgacaacgcgacggatgaagcggaggatgaagaatgattgaacgtggtaaattccgctcgctcacgttagtcaactggaacggcttttttgcgcgcacctttgatctggatgagctggtcaccaccttgtccggcggtaacggtgccggtaaatccaccaccatggcggcctttattaccgccatgatcccggatttgaccctgctgcacttccgtaacaccaccgaagccggggcaacatccggttcccgtgataaaggtctgcacggtaaactgcgtccgggcgtgtgctacgccatgctggatgtggtgaactcccgtcatcagcgcgtgctggtgggtgtgcgtcttcagcagattgccggacgtgataaaaaagtcgatatcaaatcctttatgattcagggattaccgacacagtactccccgacacaaattgtcagcgaacagctgagtgaacgccaggtgcgggttctgccgctgaatgacctgaaagcccgcctcgatgatatcgaaggcgtgcatttcaaacagtttaactcgattaccgattaccattcggttctgttcgagctgggcgttatcccgaaacgtctgcgttctgcaggcgaccgcagcaaattctaccgcctgatcgaagcttcgctctacggcggtatctccagtgctatcacccgttccctgcgtgactatttactgccggagaacagcggggtgcgcaaagccttccaggatatggaaggggcactgcgcgaaaaccgtatcacactggaagctatccgcgttacccagtctgaccgcgacctgttcaaacacctgatcactgaagcgaccgcgtatgtttctgcggattatatgcgtcacgccaatgagcgccgtgtgcatatcgaccaggcactctctgtgcgccgggaactgctcggcagccgcaaacagctgatcagcgaacagttccgtcaggtggaaatgtcccgcgagcttgcggagcagacggcctcatccgccgatctggaaaccgattaccaggcggccagtgatcatctgacactggtgcagacggccatgcgtcagcaggaaaaaattgaccgctatcaggctgatgtcgaagagctgacattccgtctggaagaacagactgaagtggcggaagaagccgcagaacagctggcggaatatgaagaacgcaaccatgttgcggaagaagaagtggatgagctgaaaagccagctggccgattaccagcaggcgctggatgttcagcagacccgcgctattcagtatcagcaggcattacaggcgctggaacgtgccaaagcagtgtgtcagctgccgcagctggatattgattcactggatgaatggctggaaaccttccgtgcccgcgaagaacaggcaaccgaatccctgttagtgcttgagcaaaaaatgagcgtggcgcaggccgcacacagccagttctctcaggcctatgaactggtgaaatcggtggtcggtgaagtcagccgcagtgaagcttaccagaccgcccgtgaattactgcgcgacctgccgtcacagcagatgagggccggtcgcgcccagccgctgcgccagcagttatccgaactggaacagcgtctgcacagccagcacaatgcgcagaaatcgctggatgatttctgcaaacgcatcgggcagcaggttgaggcggacgggctcgatgagatgctgatgacccttgaggcgcagcaggaaagcctgagtgtcagtgtcagtgaaagcggcgagtgtcgtatggaaatgcgtcagcagactgaacaactgaagcagcagatccagtccctgaccgttaaagctccggcgtggctggcggcgcaggaagctttgacgcaactgtgtgagcagtctcatgagacgttcaccagcgccaatgatgtcactgaatacatgcagcagttgctggagcgtgagcgcgaagtgactgttgagcgtgatgaaatcgcgctgaaaaaagcacagctggaaaaagacattgaacggctcagtcagccgagcggcgcggaagatggccgtatgctcggactggcagagcgtttcggcggtatattgctgtcggaaatctatgacgacatcacgattgatgacgcaccgtatttctccgccttatacggcccggcgcgccatgcgattgtggtgccggatctcagtgccgtgcgtccgatgctggatgccctcgatgattgtccggaagacctctatctgattgaaggggatccgcaatcctttgatgacagcgtcttcaccaccgaagagctggaacgtgcggtgctggtgcgcagcaccgatcgccagtggcgttactcccgcttcccgtctgtgccgctgttcggccgtgcggcacgggaaaatcagctggcagtgctggaacatgaacgggatgagctggcagaacgcctggcgacactctcttttgatgtccagaaaatgcagcgtgctcatcaggcattcagccgttttgtcggcaaaaatatctcagtggcctttgaggctgacccggaagcggaaatccgcacactgaatcagcgccgtaatgagctggagcgcgagctggcacagtttgaggatcagactgccgttgcccgtcagcagtacgcgcagatcaaagaaaatctgagcatccttaaccgtctgatcccgaataccgctctgctgcttgatgagacactggcagatcgcgcggatgagatccgcgatgcactgaccgatgcacaggaatcggcccgtcatattcagcagtacggtgcggcactgcgcaaactggagccgatggttgctgttctccagagtgacccggagcagcacgaagccctgatccgcgattatgaaaacgcgaaacaggttcagcagcaggcccgtcagcaggcgtttgccctggaagaagtcgcacagcgccgtcagcactttaattacggcgaatccgccggcatgctgacagaaaatgctgatcttaatgacaaactgcgtcagcgtctggaacacgcggaatcagatcgtacccgcagccgtgagatgctgcgtcagcagcagaccaaatgcgcggagttcaatcaggttctggcctcactgcgcagctcgtatgaaaccaaatcggacatgctgcgcgaacttgagcgcgaaatgagcgaaattggtgttcaggcggatgccaatgcggaagagcgcgcccgtgtgcgccgtgatgaactgtacaaccaggtcagccataaccgcgcccgtatcaatcagctggaaaaacagctggggatcggcgagtcggaaatggataatctgcaaaaacgtctgcgcaaggcggagcgcgattaccagcagatccgcgagcaggtcgtgaccgccaaagcgggctggtgtgcggtgatgcggatggtgaaagagagtggtgttgagcgccgcctccaccgccgtgagctggcttatgaagatgcggacacactgcgttccatgtcggataaagccctcggtgcgctgcgtcaggccgtggcggataacgaacatctgcgtgatgcactgcgcctgtccgaagatccgaagcgtccggagcgtaaagtacagttctttattgaagtgtaccgccatctgcgcgaacgtatccgccaggatattatcaaaaccgatgatccgattgacgccattgaacagatggaaatcgagctggcacgcctgaccgatgaactgaccgcccgtgaacagaaactggcgatcagctcgaaaagtgtggccaatatcatccgcaaaactattcagcgcgaacagaaccgtatccgcatgcttaaccagggcctgcaggccgtggcattcggtcaggtcaaaggggtgcgcctgaatgtgaatatccgcgaaagccacgcgatactactggatgtgctgtccgaagagcacgagcagcatcaggatctgttcgccagccagcgtctgaccttctctgaagcgatggcgaaactctatcagcgcctgaacccgcaggtggatatggggcagcgtctgccgcagaccatcggtgaggagctgctggattaccgtaactatctcgagctggaagtggaagtcaaccgtggttctgacggctggctgaaagccgagagcggcgcgttatccaccggtgaggcgattggtaccgggatgtccattctggtgatggtggtgcagagctgggaagaagaatcccgccgtctgcgcagcaaggatatttcgccgtgccgtctgctgttcctggatgaagcagcacgtctggatgcgaaatcgatcgccactctgtttgagctgtgcgaccgcttacagatgcagctgattattgcggcaccggaaaatatcagtccggagaaaggcacaacgtacaaactggtacgtaaggtcttcaataatcaggaacatgtgcatgtggtgggactgcgcggcttcggccagccggaaccaacgccggcaccggaagcattgcctgagccggtgacggaagaggaggatgacggggaagaagagcaggattaatttctccctccggtttttctctgaagcggatgagcacattgctgtgctcatccgtttttttatatcagcgttgtgaatctaaaatctcgttgttattcacaacgtcctgcgctttagtatagctctcaatcagtaactgataggccgggaaaatctgtgtgtacgcctgtgcccattctgccgcatctgcacggttccaggttttttgcagttcagaagccacagctgcagtatccatcggtaccacaccggcctggacaacgcgcgccagggtgatttcctgtgccatcttggtataggtaccggaagcatcaattaccgcaaacacctgataaccgtcagccacggcgctgatcgccgggaatgccatacaaacgctggtaatggtaccggcgatgattaactgcttcttaccggaggccttcactgctgccacaaattccgggttatcccaggcattaatttcacctttacgggcaatatactgagcatgcggcgcattttggtgaatttccgggatcagcgggccatttggaccctgcggcacagacgcggtggtgatcaccggaatattggcgagcgttgccatttttgccagcacagcggctctggcacgtaattcagtcatcggcatatcaccgactgtctggaacaatccgctctgatgatcgatcaacagcatcagtgcatcatcaggattaataacaggacgctgaccattaaagtttgccggattactcattttaagaccctcacttatgataatttgatggtggtttttgtttaaacagtatgtttctcagaaacgttctgttgtgcggattaaaattaatccataagcgaaaagctgagtagtgcggatattgataaacaatgttctgaattcagaacaatcaggcggctgtcagccggtataaagcggcggggattcctcacagtgtgatctgaataacgttaatatgaaaccggaatggttagattctcactccgcgtgatcgacacagaaaataaaggatatacaatgcgtaaactgaccctcaccctgagtgccctggcactcgctctgagcctcaacagtgtggctgatgccaaagtctacatgccggaaaaagtcagtgatggcgtgaccgctgctcagctggcagaacagcatgccattcactggatttcggttgaacagattgaagagagcctgaaagggcagccgccgatggcggtgggcttcgatattgacgacactgtcttattctcaagcccgggcttttaccgcggcaaactggaatactccccggacgactacagttatctgaaaaacccggaattctgggaaaaaatgaataatgagtgggataaattcagtatgccgaagaaatccggtatggaactggttcagatgcacctgaaacgtggtgataccgtttatttcatcaccgggcgcagcaaaaccaaaacagaaacggtcaccaaatatgtgcaggaagggctgcgtatcccggcagataaaatgaacccggttatttttgccggtgatgaggaagggcagaataataaagtcagctggatgcgtgatcacaaactgaaaatttattacggtgatgcggatgccgatattgccgcagcacgggaactgaatatccgtggtatccgggtattacgcgcatcaaactcttcgtatcagccgctgccgaaagccggtcagttcggcgaggaagtggttattaattccgaatattaatcataacccgtcagtcatctcagctccgccacccggcggagttttttgtctgtgctgtttattgtccggcgcagatctgtttatccgggaagaaaagcagagaatgagatgtatttcatcgcactcaatacatgtgtttgtgtaattagtgcagtgtattcctcttaaaaagatgtatttgcgccttttttctacgattttttcgttatcctattttcaattattctctgacaggtaaaatcagcagggaagtcatttaaacgatacatttactatactgaccataagtattaacaattggccggaacagacataataaaaaataagagagggatgttatggtgacgggagttaaaaaagttgttcccatttccgccatgataggaacactgttactgacgcctgtttcgtgggcctcaacagcaccggtaacgcatctgactgaagcagatgccaaagtggaaaatctgaaagcattttcagaatcaccggaaagtacagaaacacaggttgcagagccggtggccggtgttaatgcactgcctctgagcgatgtcgctgacagtatccgccgtgaagttccggcggcaacaccgttactttataccgacacactgacaaacatttatgcggaacatcagctgaaaccgctgtggaccgatgaaaaagcgcgtctgtccctggaaaatcagctggcggaagccgcacttgccggattccagccgcagttcacggcctggctgaatgccctggcacaaccggatctgtccccgctggcgcgggatatgattttaacggatgcggcactgggttatctctattacctcgacaacgtgagcaccaaaggcgataaatggctgtacggtgcccgtccgttcacgtttgcggctgtcagtgccccgtcactggcacggctgaatacagcggctcataacggcactctggcggcatttacagacacgttgttaccggcgaataagatgtatcagccgatgcgcaaagccatgctgacagaactggcggataccgcgccgtggccggaaatggtgattaaccggacattacgtccgggagaaagccacgaatctgtcggggcactgcgtgagatcctgcaccgctttaatctgatctctgccaatgacatgatgagtgccggtgctgcttacgataaaacgctggtggcggctgttaaacagtttcagttacagcacggcctggaagctgatggtgttatcggtaagcagacccgtgaatggctgaataagacaccacagatgcgggctgccattatggcggtgaatattcagcgtctgcgcattacgccggacaatgaaccgaccgctattctggtcaatattccggatttttccctgtatttctatgtggataataatctgatcctggaatccagaaccattgtcggccgtgcggaacgcaaaacgccgattatgtccagcgccctgaataatgtggtgattaacccgccgtggacggttccgccgaccatgagccgccaggatgttgtaccgcgcggcagggccgatccgagctatttcagcagccgtggttacaccatctataacggctggagtaacaacgcctctgtggttgatccgtacagcattgactggagtgttatcacgccgtcaaacttcccgtaccggataacccaggctccgggcccgtccaactcgctgggacgctataaattcaatatgccgaactcagaggcgatttatctgcacgataccccgaaccacagcctgtttaataaaaacatgcgggccatcagttccggctgtgtgcgggtgaataaagccaaagatctcgcggcgatactccttggtgacgcgggctggaacgaaacccgtgtggatggtgcactgaaagcgggcagtacccgttacgtctctatcccgaaccgtattccggtttatctttattatcagactgcctgggtaaatgcggagaatatcccgcaatatcgcgcggatatttaccgctacgatgacagcagcctgaaaggtattgataaattaactgatatcacgcctttcctgataaaaagctgatcacatgaagccgtttatttattacaaataagcggcttttttcttctgaaatataattaaccggaaaacgatgtgcagataaaaataattcactgcgcaatattatattctgtcattccgttaattaactaaaaatgattaattttgtcatatcaccgctcccggcaaaggctcagcggatgcggcattgtgcccgccacacaccggatgttcatgaaaatgtcggtgaggtttactttctgagtaaaaatgtgtttttttatttgactccgggggattgaatcggtaaaaaatagacggtcagttttgtttattgctgtttttttcatattgacgttaatattgaaataacctgacgaaaatttacagaaatagacaaaaccgatccgctgcgggtctgaacggtgaacacaattatcgctgtccggccatgtaatatttaatcagataaagagtgattaccgtcaatggatacaattgataacgaccgccgtaaatggctgggttttggtgcggcggcgctggggttggctttattaccgaatcacgcatttgcgtccctgaccacaccccggccgaaaattttacggtttgaaaacctcaataccggtgaatttttgaaagcagaattttttgacggtaaacgttataaccgctctgaactggcccgcctgaacaagctgttccgcgaccaccgcagtaataaagtcaaaaccattgacccgcacctgtttgaccagatgtatctgttacaggtgatgatgaacatcaataaaccaatccagctggtgtccggttaccgttctctggtcaccaataatgaactgcgcagaaccacctccggtgtggcgaagaaaagttatcacacccgcggccaggcaatggatttccgtattccgggcatccagttaagtcaggttcgtaaagcagccatgaaaatgcgggctggtggtgtgggttactatccgtccagtaatttcgttcatatggatacaggaccggtcagaacgtggtaatctgttgctattacccgctttaaccggagttttgtgtcatgcaatatcatattatccctgtcaccggctttatgcagaactgtaccctgatttggtgcgatgaaactaaagccgctgctattgtcgatcccggcggtgaagcgccgcgtcttatccgtgaaattgaacaacgcggtctgaaactggaaaaaatcctcctgactcacggtcactttgatcatgtcggcgcaaccgcggatgtggcagagcactttaatgtgccggtggtcggcccgcagaaagaagatgctttctggatagaggggctgacacagcagagccagatgttcggtgtggagccgtgccgtgcatttactccggatcagtggctggaagatggcgataaagtcactgtcggcaatattgagctggatgtgctgcactgccctggtcatacgccgggtcatgtggtgtttgtggataagcaggacaaactgatttcaatgggtgatgtgctgttcagagggggtgtcggccgcagtgacttcccgcgcggtaatcatcaggatctgatccgttccattaaagaaaaagtgctgccgttaggggatgagtaccgttttattcctggccacggcccgatgtccaccctcggggaagagcgccgcacaaatccgttcctgcaggatgagcaaccggtctggtaagcaatatcattgcagaaataaaaatgcctgacacagtcaggcatttttatggtcaaaacgaaattacagcactgcgacaatggcttcgcacagcggaaccatattttccagtgtcagaccggcaacgttgatacgaccggagctgacggcatacaccgcatattcatcacgcagacgtgcaacctgttctttggtcaggccgctgaaagagaacataccgttctggcggataataaagctgaagtcctgcttcgcacctttttcctgtaaggtgttcacaaagagctgacgcatacgcttgatacgctcacgcatggtggtcagttcctggatccactcttctttcagttccggatcagacaatactgttgttaccacagcaccaccgtgtgacggcgggttagagtagttggtgcggataacgattttgatctggctgaacgcgcgatcagcggtatccggatcagccgtaaccagggtgcaggcaccgacacgttcattgtacatgccgaagtttttggaataagagctggctaccagcatttcagggtgagattttgcgaaaatacgcagcccctgagcatcttcatccagaccggccgcaaagccctgataagcaaagtcaaagaccggcagcagacctttttcttttaccagaacagataattgcgcccactgctcagcagtcgggtcaataccggtcgggttgtggcagcagccgtgcagcaggatcacatcaccggcctgtgccgcttccaggcttgccagcatgccattgaaatccagtgaatggttttcggcatcgtagtagttgtaactgcagatttccagaccggcaccggcaaagataccgttatggttaggccaggtcgggttgcttatccagacacgttttgcgctggtttgtttagcaatgaaatcagccgcgatgcgcagcgcaccggtgccgcccggcgcctgtgcggtacgggcacgtttggcggtgatgatgtcactgttatcaccaaacagcagtgcctgagtcactgttccgaattcagggatcccggtaatcggcaggtagtttttcgtggtttcattatccagcagatacttttccgcttttttaacgcagctcagtaccggtgttttaccggtttcatctttataaacaccaatacctaaattgattttgttttcacgggggtcctgacggaagctgtcagccagacctaagatcgggtcggcaggcgcggcagtaatattctcaaacatagttgttgatcccaatagtatctgatagtgcggataagaggactgtcacaaggttatcaggttaactccctgtaaatcatttgccaactgtttacagaaaaaagacgaagatcttgtgaagtgggtgacgtcctgttgaggtttacatgaaaatgcatcacaaaacgcgttatatatccaacgtcattcaagttacaggaaggcggcaaaggaagacagatggggagcatacattagtatgtgacccagctggctgagtgcagccaacgaacctgtagtttgaatgaataaggatatacagataacaaaaaacccacggcataccgtgggttttgtattcatacttagcgttaacgctaaattagaactggtaggtcagacctaaaccaacaacgttgtcagcgttcacgccagcttcgttgtttttgtccagcaggttgattttgtagtcaacaactgcagacatgtttttgttgaagta

SEQ ID NO: 38 - DNA, 87332 bp, unknown
  Altogen 322075 strain
  misc_feature (44690)..(44690): n is a, c, g, or t
  misc_feature (44725)..(44725): n is a, c, g, or t
  misc_feature (44947)..(44947): n is a, c, g, or t
  misc_feature (53170)..(53170): n is a, c, g, or t
  misc_feature (83565)..(83569): n is a, c, g, or t
atcagtgacagcaccgcgttttcatggcgctacgccgaacaactgtgcggcgatattcagatccacaaagattacaacccgcagaatccgtcctatccgctgcaacaccagataacaggtgaagtgcatcagcagcacagcacctttgaaagctacgggcgttttcagcaggatgtgccggggcaaccttttactcaactgcgctacgaacaatctcagaatcagcgccagaccggtaccgcaggtactaactgctttgcgctgatgccgggcaagatttttaccctgaaaaatcacccgtctgacagcatgaataaggcctggcaggtgattatggtgaatcatcccggtatccagccgctggcggataacagtggcggagaaggaaccaaattcagtaacaccgttcagtttatccccggtacgcaggaatggcggccaccgttccgttataaaccgacagctgacggcgatgaactggcaacggttgccgggccgccgggtgaggaaatctataccaattcagaaggcgctgtcacggtccggttccactgggacagacgcggcaggcctgatcacagcgcctcctgctggatccgcgtagctcacggctggaacggtgatggctttggctttatgtcaatcccgcgtatcggccaggaagtgattgtgtcgtaccttaacggggatattgaccgcccgatcatcaccggctgcacgtataacggacgcaaccgcccgccgctggagttaccgaaagaaaaaacccgcaccaccttccggaccaaaactcacaaaggggacggatttaatgagctgcggtttgaggatgaaggcgggcgtgaagaaatttatctgcatgctcagcgggataataatatccacattaaccacaataaaactcagcatgtcgggcatgacgagatgcataccgttgtcaatgaccgcaaacatgaagtatgtcatgacgaatttattcatgttgtaaatgagcagacactggaaatcggtgttaatcagtttgagcacatcggcaaagatcgtatcacccgtattgataacagccggaaggaagtgatccatgccagtcacttccaggaagtgggcgaaaataagcagtgtgatgtacagaatgactacaaattaaccgctgcaggcggcattcatacacacacaaaggtgcatacactgcaggcgagcgaaaccgttattattaaaggaaaagcgggctccattcagctggatgcgcagggagtcacgatcaccggcaatattacgctgaaaggtaatgtatcaatcacggggggcgctcctgattctgttgctttattggatgctgccgttaatgaaggactgccgctggcggaagactgcagggccaaagccatgaagaaagaggtgtcctgatgccggtttcatatgaggatattttccggaatttctgggtggcaccgtgccgttacacccgggataacacgcagtacagtggtatgatgacggttgcgggatccggtaaagatcaggctgtcgggaatatgcgccgttatttttcagcatatccggaacattacagtgctgctcagtatgacacgctgatcccgttaattgcgtatacagaagagagccggcagccggaattacccttactgcggcgggttctccgtcagcatagtgatggtattccggcagtattgaccgatgaacataacctgaccagtcctttgccgtctgaaaaaggcgatattcactatcagccgggtcagccggaatttatcaccggtacctctctttttgcggtgcttgacagtggtgaatatcatcgtcagaccggacagcatcttgttccggtactgcacgggatacatctgccgtggcagtcgctgtatcagggcgaaacccaggacagccttgaagaccgtgcgccttatctggtgcaaatccatgctgaccgtgcgggggagcagtttcttgcacattgcctgaatctgccggataaagcggctgccggtttttttatcagcagcagccgatcgtttacggagatgcaccggcaactgcgtaaaatgacgtatctgcgcaatcaggccacagacagctggaattttttccggttttatgatgtccgccattttattccctttatcgaatcgctgacgaacgggcagttactcaatattgccggtggcgtgaccgcatttacaggctacagcccgcaataccctgatggcgtaaggatcacgttttcgcctgaatattcagcggatgccgggcggcgtgaagcgttatttatcaatgaacggctctgccggcattacgcccggctgacgctgatgagcacactggtaaagacccggcaacttattgagcaaaatgaggccgtaccggtgacggaaaagaactgtgatgaaaaagtatcagaacagtatttcatccgtgaagccaacctgagctttctggcgggaacgacccggatgcaggccttaatgtaccggttatccgcccgttatctgtgccgtcacgatatatcactctggaaaacagcctgtgagcacgccatgccttatcagcacaatcaggtgttattcaactatcattgctatgctttttgtctgcagacacagggagtccccgcatgaccggaaatgtgaattctgacgtttcaaccccggaagaaaaacacctgcgtaacatggtggagtcggtcaacaaggccgctccccggaacctgccggcggacgcagtggtctgcccgtgtgagaatgaacaccgcccggtctatccggtacggtatgcgtactcaaatttatttggtgatgaaaatgcccgggcggctgtgcctccaccggttaagaaattgctggagctttgccccgcacaaccggactttgaaatttatgagtctgaagtgtgcagcattgaagagacaggtggattcagtgcgcggttgttacgatcaggatgggtctatgtgtttgaagaaggcgaatacccgacccggacagatccccggggacaactgctgatttttaagcacagtatcacctatgcatataatggtcgtgtttatgatgagacagataactcagcagaagcggaaaaggcggttaacggtggcgatgcggatgaatactttataccttatgcccggatatttgataccggatctcagacttgggtactgaaagagcagtttccttattacccctatctggcgataaaaaaagatgttatccgtgcccggttctttttcagcgatattccgttaccggattatacactgaataaaatggcctctgaccctgcatttcgcgaatcgtttatgcaggaaattaatctggtagattttaatgataacccttatgcacttgaattgtttgaagagcatattgattatctggtagaggaatataaagaggagtcacagaggttttctgccttcgcggaacaggctaaaaaggtaggagaaaatctggccgggggacattatttcgctgaaattaccaatacccctgatgtatctaaaggttctgaagcgctgcttgcacaggtgagagcctcactggatgataatgaaaaaagtagtctggtgatattacacgaccccgtggggtatcagaaagatatacttgcgctgtattcttttattaccgtgttgtacgccacattccagcattactggagttatcctaatcaggtcggtcaccatctttcagcgattaaaatgcatttggaccatcctgatattgcgcacacaggggccggattccgacggaatgaacaatttttggataatattgatgttgaaggctggcaaacttactggcctgaaattgaggaaggatataaaaaatttgagcagcttcaggaaaatatagtcagactgtatggtgattttttaacgaatccggaaataacaaataaaacaggcggtattaagaattatattgaccatgtttttttaatccgggaacagtacaaacagggagatttctggcatcgtgagttttttgaagaggtcagacgctacagtgaatttcatgaattgttgttatcaccgttaaacagctcaaaatcaggacagcagatgctaaacctgatattttcggttgataaaccggaggggcggctctggaataatttatgtaatatagtggtcagcttactcagtaaagaagagctgataacgggcggaacacattttttccaaaaacagattctcccgtcattccagtcagtacttctgattggctgggatgcattagggtatgcgtttacaaaaactcacgaacaattaaaaaaaacaaccagccattcccgtaatattacgcaggcaggtattgattttctggcaaagaaagtattgccggcgtttttgggtttttgggggattcgggtaaatatggagacgttacagtctatgtccggaaaacaatttatggactggatggattccctggacgggaaggtggcgccgcttaaaaacgcttccgggcagatgaaaaaattgctggactgggatacaaaactgagaaacccgaaagtaacacatgcgattaagaccattcagtataactacacatcaacgggtctgccagttgataaagagacgtttaaaaataccttctctttgggagtgtcactttataccctgctgacgggggttttgggactttatacaactaaaatgacggagtatgaacaaaataacccgctgaatactggtgcagtcaatgttttttacacgcaaatgattgtccatatgatcaatacgacaggaggcatcttagcgacacgtcaggcagccggagtttatatgacgcgggtcacttatccgccactcagacacattttaatgaaaatcagtttgcctgaggctacatctgtactgaccaaagtgggtgttaaatctatcggttatgttgtcgcgctggcgggagtggctgtaccgatagcccagatgatggcggagatagataaaggtaaccatgtggcggccggagcaaaatttatggaggccgcagcaacccttgcactgagtgtgggagtggctggtgtcggaaaggctaacgccattattaaaggagtggcaactctcagcagtaacccgataatacgcgctgttactgtttatgcgtgggaaatcgtccttggcgcagtagtgctgcttattggaggcgccacaatatattatttatttgaaaccgatgattttgaagaattactgaaaaaatgtttctggggtaatggaaaaaaatactttgcggggggggaacctattgaaaatagcgataggcctaataaaaaagaagttcaattagaaaaatatattgataattttgaaaataatacctcctgtttccaaatagaattacaggagtttttaaattttttctttacgccgcaagtgaaaattactgtgcagccgaaagcaaaagccggtcagatcccggattcaccatatgtcgctcattatgtgatacgttatcagttcagactggctaactttcagtgtggtctctcggatattgaatatcagctggtaaaaataaaacagacagtaatgtatccgtctcagatgccggtaaagtatcttcctccgaaaccggatgtcattctccagcataaaggatacgagtatattgcatctgataatcagacttttaacaggacatttgaacaggctctgacgaccgctctgcagaacacgtcattgcgggatggtgaatttgagttcagctttgaggttgatgcaggagtgtataccggtgacccgttaaagaatcatttcgttccgtctcttcactggtattatctggttgaccggatgaaaggggatattgcaccgctgcgttaccgtaaaggtaatttgcaggataaaatttatggttatattgatgataaggaaatggaatgagcaacccgtttacagtatcaagaaaaccatcacaactgaaaacttcgcgtctggcagatgcaagccatcattatgatgacccgttaccgctgaaggacttggtttttttgcaaagcatcaatgagcaggaatgcagaattaaatcatctcagatcaacagtcggatatcgaatacggttccgatgtttgtggtgctgttggtgatgatgttttatacattattcacttttgttgaaagccataatgctaaaaaattcgacttcgaaacaagtgttaaacgtgtagagtctcgactaggtaattcaacaaatttaaaccagtttgataaaaagattatggaaatctataagccatattttggaaaaaatgaaataagttggttcgattattttaaagcttattatattgatgactactatagtggtactgagtatgataaatattttattattatttggctgattttttttccgggtggattatatatattgggctccctgagttttcttgttccgatgacctggttagtagctgaccgaaaacggggtattctgtattcttacgtagacggaattgtgatggcagtgcgttatgaggatgcacaatttggctttgcaggcaggatgctggcgtttaaattattttatattcatccggaaaccgggaggttaggtacgcatatttacagacccaatgtctctcactataccggttttttaatgagtacggatactgaaaattaccgttttattacgttcttaaatacgtatatgacagagggtcgtgatgctatttcacctgtggattatcaggcgcgtaatccgctattctgctttgccaaaaacccgctcccggataattttgaacagcaggttgcacagattctggcagaattggataaaaggaagcaacgtaatgcgcagtcagattaacggccgtaaaatcattttaaaaaatgataccaccaataccggaggaaccgttctcagaggttcctctgccgccagacaaaggcaggaaattgcctgtctgggcgatccggtgtattgcccgtcgtgtgatcaaacggggactatagctgaaggtgacggtttaatgaaaatcaagggaataccggttgctctggagggacataaagtgacgtgcgggtgttccggcggatgtgtgcttgttgcggcagattaaattttttatcggatatcacagggagggaaccgcatgaccagtttatataccgcaacaaaacatccggaacaactggagacaaccctgctaaccggggaaagccatctgtatgacgatcctttagagccccaaaaactggtttttttggctgccgtaaatgaacagcgttgtgtgattaattcaccacaacgtaacagccaattaactaacaccatacctttttttatagccatactgattatggcttgttatacattattcagctttactgataatcatcttgcaaagaaagcatcgatggaaaggatgtctaaatatttacaagagcaatataattatttatctgaggatgaaaaaataaacgataaagctattgttctttactctccttttttttataaggaaaaaataagctggttggaatatataaaggcttacgattctgggagatattatattaatggacagtatgaaaaatatcttgtgattggctggcttattttatttccgggagcgctatggttgtttggttatctggccttttttacgccaccggtttatttaacagcagacagaaaacgggggatcctgtatagccatggcaggggaaaagtgcatgtcacccgttatgaagaggcacaaatcgggttagccggtaaaatgctggctatcaagctgtatgggattgatgaaaaatccggtgaactgaaaacgattatattccggccgaatgtttcccactattctgcgtttctgaccagcactgacagcgagaaccaccgctttattacgttcctgaatgcctatatgcaacaaggccgggatgctgtctcacccgtggattatcaggcgcgaaaacccttcctgtcatttggtaaaaatccgctccccgaagactttgaacagcaggttgtacagattctggcagaattggataaaaggaagtagcgtgatgcgcagtcagattaatacccataaccggaagtacagtgcttacaggcttccgtcaaaaagccacccgtattaacagatggctttcccgcaatactttcttattcctgcaatcccgcctgaatagccgtaaacagatattgtccgatttccggtgtcatccaggtgcctttggatatagccggttcttcccggtaaacccggcggacaatctcctgtaattccgggtcaccgccggtaaacgtgttaaacatcacaagccaggtttgtgccagtttccggaccgccggtgatgcaggggcttctcccgatttcatggcagtatacagtccggcgattaaatccggccagacagccccggcacggaaataatgctgctgcataaaggcaaactgctgcggggtgacatggggcttaaacagagaaagctgatattcactgaagctttccgcgacaaattctatcatctgctctgtaataccggatgatgcggcaaattcattatctgacagatgcattttatttaaccggcagaagaaatccggattaccgccggtgtcctgctccagtgccgccatccagcgggcggcgagctgctgtgcctgcggggatgtcggtttcacgccttgtgcggtcagcgatttcacttctgcaacccgctcctgccattgcgcactttttaacgtgtggccggtatataacggcatttgttccagctcattatgagtaaaatatttatcgtacacagacatcatctccaaaacagaaaagcagtcattcagggagagtgtttctccggcgtgcatctgctgacaaagtgtatcgagccggtaacgcagtgccgccatttcctgcatctgcactgttaatacactgactctctctttcagcagattcgccatatccccgccgtgaccatcgagtattttaccggtgtcctttagtttgacgcctatctgccgcaatatctgaatccgggtaaggcgttcgatactgtcagcattatagaggcggtaaccggcaccggtccggcttacaggctgtaataaacctatctcttcataatgatgaagtgtgcggacagtcagtccggtcttctcagcaatttcaccaacctgaagtaacatattttcctcctgtaatgcggctcagactgcggccttacgtaacgtaagagtcaatacccggtttttattttattgcgtctgttttgcagacgggtacacgtacagtattgtaccggttccgtataataatgagattcaaataaaaaaagcaggagtgatctttggttaccggaccttttattaacgccgccgcagtgctgattggcggaattgccggggcagggctgagccaccggctgccggaacgtatccggacatcgatgccctccgtattcgggctggcctcgctcgccatcggggtgttgctgattataaaatgtgccaatatgccggtgatggtgttgtcggtgctgctcggggcggttatcggtgaactgtgttgtctggaaaataaaattaatgcggtggccggtaaaataaaaacccggcttccggcacggggcggggcacaggaaagttttatcgaaaactatgtggtgctgatattcctgttctgtgtcagcggtaccgggattttcggggcgatgcatgaaggcatgaccggtgatccgaccgttttgctgaccaaggcttttatggattttttcaccgcgatgatatttgcctgctcactgggtattgcggtgtcggttattgccgcaccgatgctgattattcagctggcactggcgggcagcggtgcgttattaatgccgtttaccaccccggccatgatggcggattttactgcggcgggcggggtattattaatcgcgaccgggcttcggatctgcggtattaaaatgtttgcggtgattaacctgcttccggcactggtgctggtgatgccgctgtcactgctctggtcatctttctgaattatgatgtaaatcagccggatagatacagcagacagcggcagtctgtcatgcggggttattttttggttattgatcccgcaaaacagcatccggctgaataaattatccggaaatacaggattagctgttgttatctgctttatttgaaccacttcaaaaaattcaattacttctgaaatcacagggttataatccggaaaaccgattcagttactttccgtattcattccatggatgtcatcagtattatcatttcagcgggtaaatcctccgttgatgtcgcgctttataccttattaccgattatggtcgtgatgctgatcataatgaaatacctttctgtcagaggcgtgctggatgtgatagtccgctggctggcacctttacttaaaccgttcggcttaaccgggatgagtgcattcgcgctgatccagataaattttgtcagttttgccgcaccgctggcaacactcgcgattatggataagcggggtgtctctgatcgccatatggccgccaccctggcgatgtgttttgccatggggcagggaaatgtgttttatccgctgatgccgttcggtctgcactggacaacctccattattatctcggttgcagggggattgtgtgcggcagcttttacctggtatgtcaccggccgccggttatccgcaacagagaccgcaagctcagagccgctgccggatgcggagcagaataatcaggggattttgtcagttatcaacagcgcgggggcggatgctatccgtctggcactcggggctatcccgatgcttatcctgtcattatccattgtcggattaatgcaggccgctggggtgattgaatggctgcaccatattctgatgccggtactgaattttatgcatattccggacagttttgtgctgcccgccctggtgaaatgtgtggccggggggaccgtctatttcggagtgatttctgacctggtacagcagggcgcggtaaccgccaatcagattaatgcgtctgccggtttactcatccagacatttgatttaccggggatcggcatttttctcggtatcagttcgcggtttgtccgcttattccgttatgtgatcccggcagcactgatcggtattctcatccgcacggttttgcatatagtattattttaagccgcaggagataagtgatggatattcgtgaagatgaaaccagtttttatattctgtctgaggacggcaaaagccggatagcggaaatcacctttgtgtataccggggataatctggcgattattgaccatactatggtggatgacagcctgcgcgggcagaaagtcggtaataagctggttgcggcggtggtggagaaaatgcgtcgtgaacagcgcaaaattattccgctctgtccgtttgccaaaagcgtgtttgataaaacccgtgagtatgacgatatccgtcacgccggataatgcacaatgccggaggggaaccggttttcccctcacggcacagacagaacagttaccatccgcagatattggtttcttcatccatatcgtagccgcggataatattaatcagatccttgacgatttgcgccgcgttttcagcaccggctaattcagccgcagaatccacgtctttatccactgacacaccattatttttattggtcatggtgaccatcagtgccgcatcattaatcttttctttgccgtctaattcactgaccagcaacgcgatttcttccgctgcaatctcagggatatataactttttcggattcagaaagagtttctccgctttcaggccgttactttcatttatcagctctaataaaaagcctttgttttcgtcgttcatgattgtgttactcctcggtcaggatctctggggcgacataaaaatcgacattgaacaccgtatcgtcagtaaccgcttctatccggtgccaggtttccggcggaaagacaccgaactgcccggcttggattaccagggtgtctgttggttcagggctggtttcatctgcataggaatagtaaacaatcgtgccctgcataacagacagtttaggataaacgccctgacgggtgcctttatccagatgtctttgccagatagattttggtgcggtttctttggtccagagcggggtgctccggacatgaatgtagttagtcggaataatgatgcgttccatctgtgttctcctgaagttaaacacatgattaagactcaatcttaaaatacttttcaaaatataaaaagtattttagatgcaacttcagaggaaacagcacgatttacctgccggcagaagagcagccggaggtatacaatgcatgataattaaccgtcgttatattgtggttatttggtggtttgcttattaattgcggtactgtcggaatgaaagtagtgagggatatatgggcagatatcatttatagagcctaattattattcgtctcgaaataatataataggtattatttaattaacttaacgcaattaataacattaaaatgaaagaaatggtttcttaatgaaacttattttcaattaaactggtttttttatttacagaaaacagatatatctactcaatatttaaacctgtctgaataaaataacaacaattaagtgtgtaatcacatattatgaataaacaagatttataaaccagcgtaaataatattttgtgttgagtattcattctggcgtagttttatttatctaatttcagtcatgtgaggactaaattgaagtaattcgttattaatcacctatttttaagatgtaaaatctgacatagataaattttacggaattaacacatgtaaccaaatgtttcattttaatgacagaccttgttttttaactatatgatatataagaaataactttatttttattgattttgtataattatcagtaattggattaatacaaatcaatagataaaatctatcattaatgaacattaaaggcgtaaataacgattggattaacgtatttgaacctcagtattattagtcgcaagtaaataaattaagagcatcacagcatttactacaattagtatttataaaatttatattctgtaaaagcataaggtatatttatgcaatcactagacactgtgcgattttttgtcgaatatgacgccaataagtatttgggagccttgttacgtctgagaagaaaagaactgggcataagtggtcaggaattatcaggaatgctgaatatcagtcagcagcaaatatcacgctatgagaacggattaactaatttcaatatcgttatccttttccgttttttttcctcattaggaatgacatctgaagaggttgtcagaatctttaaagaactgggactgttctattctgatttaaatatgagtcaatatcagaaattaagaataaaggagggaagctgataatattaaaaaacatggagtaaatgggttttttacaggaaaaactcacctgtctgtcgcaaataataatattttaacatcaaataaaattaacaatgaggattaaagcgtatgttgaataaacaacgtttagttatgtctgtggttgctctcgccgtattatccgcaagtcagttaagtatggctgcaacaactgttaccggtggtaccgttcactttaccggacgaattgtgaatgccgcgtgtgctgtcagcgctgactctactgatcagacggtcaatatggggcagtaccgcactgcattctttaatgccaaagggaaaaaatccggtgatgtaccgttttctattaaattagaagactgtgataccagtgtatccaccaaggcgtctgtttcattctccggattatcgtccgcagatgacccgactgcattgcagaccagtaatatcggcggcggttcagccggtgcggcgaaaggtgtcggtattcagattgctgatcacctggggaaagtggtgaaaccggatggttctgttttttcaaccgcacaaaacttagtggatggcgtcaacgttctgaatttttccgcaaattatatttcaactcaagccacggtaacaccgggcggcgcggacgcggatgccacttttacaatgcagtatcaataaagtcgccttttattgctgaacccgttagcgcgttatcagtggcccgggtgaccgggtcactgtttgccgattggagtaaaaaatgcataaattaatcagcacggtatttttattgtgcggtatttctgccggtgcttatgccggaaataaaacgcataccattattgacgggggtatggtgcatttaagaggcgggctggtggaagccggatgtaccctttcaacaaacagcgaaaatgatgttattgatatgggggaattcagaacgaatcagtttaagggaaccggcagttattcaggaaatattccgtttaagctggtaataaccaattgcagtacagcggtaagcagcaaagtcgggctttctgtctttggttatattaatgagaaagatccgcaaataattaaacttgaagacagtgatgaagccgcaaagggtgtgggaatagctattctggatagtgatggcgatattattattcctgacaatataccctcaaaatggatcaactttcacgaaggtgaaaatgtattacattttaatgccagatacagagcaacggatatgcaggtaaccggcggaaaagccaatgcatcagtatggtttcatttaacatataaataataattaaatattctctgcggggatttaaataatgtacaggtcagcatttactatgagaaaaatactattttcttttatcatcgcattcctttttccggctgtggcatcggcaggcggaattgctctgggtgcaacccgtattatttatccgatggaggcaaaacaggtgtctctggcggtaacgaatacagatgaaaaaaatcgctttctgattcagtcctggatagatgatgcttctgataaaaaaacaaaagtattcacagtgactccgcctttgtttgtcagtaaaccaaagagtgaaaatacaataaaaatcattaatacaggtgctgagttacccaaagacagagagagtttattctggctgaacagtaaagcgatcccgtccgttgagcgtgaacaggttgcagataaaaacgtcctgcaaattgccgttctggccaggatcaaaatgtttgtccgcccggccggtttaccggtgaaagcaggtgacgcttataaaatgctgaagttcaacagaatcagcggcggaataaatgtgactaacccgtcaccgtattacctgaccgttgttaatatgatgattggcaatcagaaaattgaaagtttcatggttgcaccatttgctgaaaaaatagttaatacagcacaaccagctgccggcggaatatcatatcagacaattaatgactatggtgccaatacgccggtaattaacgttaattcatattaactactgttatcttattttatacggagcgcattttatgcagaaattaactctgctgaaaggattgccatgctttaaatttaacaagataatgttaatgctttcatgtgcaatgataaccggcaatatggtcattattaagaacggctatgcagatgaattttttaaccctgcatttttgtcagataacggtaatgaagttgctgatttaagccggtttgataaggggctgggacaggctgcgggtgaataccgggttgaagtttttcttaacggggagtatgtggcaacacaggatatcctgtttgtcagctatgaaaaagagggtgaaataaaaccgggtacagatgatagcggtttaattccctgcttaaccacggactggttaaaaaaatacaatattgataccagtaaagccgtattactgaatgacagctgtgtggattttcgttcaacttacgacaaatcacaggcccgttttgattttgaagaacagaagttgcgtgtggatattccgcaggctgcatttatcaataatatcagagggtatattccgccgtcagaatggcaggacggaatcaacgccctgttactgaactatggttttaccggcagtcacagtaaaaacaccaaaaatgatgaacgatataataactattttttaaacctggacagcggtattaatctcggcgcgtggcagctgagaaataccagtacctggaattacacatctgaccggcgcaccgataacagtcagtggaataatatccgtacttatgtgcagaaagcgatcgttccgctgaaaagtcagctgaccatcggtgacagttttacggaaaatgacattttcgacagtgtgggattcagggggataaaactcgcttctgacgataatatgctgccggacagtatgcgcggctttgcgccgactgtcagaggggttgccaacagcaatgctcaggtcactatccgccagaacggctatgttatttatcagtcctatgtttctcccggcgcatttgaaatcaaagatctgtatgcaacgtccagcagcggtaatttggatgttacggtgaaagaaaataacggttcggttactcagtttacggttccgtattctgcggtgccgatgttacagcgtgaaggccggacaaaatatgaagtaaccgcaggggaataccgttccggttcatccatgcaaaatagcccggatttctggcagggaactatcagccacggcttttcagaaggtgtgacggtatatggcggaacacagttatccgataattatcgtgcgttttctgccggtgccgggaaaaacctcggtgtatggggtgcgatctctgcggatattacacaggcaaacagccgcttacccaatggtgagcataaacaggggcaatctgtccggtttttatatgccaaatcactgaacgaactgggaacaaactttcagctgatgggataccgttattccaccaaagggtattacacattaagcgaaaccagttataaacagatgagcggctataatatcaaaacccaggatgggcctgattatagagaagctgaaattattgattatcataacctttattataccaaaaagggacagtatcagatcaatatcagccagcagtttgatggttacggctctgtatatattaccggcagtcatcagacctactggggaaccagtgaaactgatcagtcatttcagctgggttttaacggcagctgggaagatatcacctatggcgtaaactggtcacaaaataaatcggtcggactggcagataaagataagcggattgcctttaatatttcggtgccgctgagccgctggttcggtggcggggatgctgcggatattaccggatcccggaataatatttattccacgtatacgctgacaagggatgacaagaataaagtctctcagcagctcgggatatcaggaacattacttgaggataataaccttaattataacgttcagcagggatatgccaataaaggtgaaggggcatccggtagtgcgtcggttaattatcagggcggatacggcgaggccggtgccggttataactacggcagaaactggcagcaggtgacttatacggtccgcggcggtgttctggcacatcagaatggtattacattaagtcagccgctcggccagaccaatatattggttgaagcaccgggtgttaaagatacctctgttgaaaatgcaaccggtgttttcaccgactggcgcggctatgccgttattccgaatgccaccgcttaccggaataaccgggttgcactggatgtcaccacattaccggataatgccgaactggataatgccgtggattatgtggttccggtacagggcgctattgttaaggcgaattttaaatcccgtatcggtctgaaagccatggtgacactgttacagaaaaacggaaaagtggtgccgttcggggcaatagttaccgatgagcataccggtaaagcaaatattgtcggtgacgatggtgtcgcatttatgacaggtctgccggaaaaaggaaaactgaatattgcctggggaaatagtgcagattcacaatgcacggctgaatatcatttaacggccggaaataataccccgatcagtaatatcagtgcccgctgtttataacacgaatcaggtaaagtgagttttaattatgcgtaatattatattatcaggtttacttctggtttgtgcaaacagctatgcggtaacctgtacttccggatgtaatgatgtctatcttaagatagagcaaaatctggcatcaaatgacaatgataccggtgctcagataaacagtaatgcgattaccacaccgggattaggaatgaaagcaacgcacaatggttatcttatgcaatgggcgaaatttaatggtgatccgattccggcaccgccctctcatgcaaccaactggcagtttaaaaaggtggatgactatatttcagtggcattatcccgtgatagtccctgtatcggtaataccggaacgatttatgttccgtttaatgagagagtttatggtcccggttgcgtggcccgtgttcatcagaccggggatgatttatcaataaccccccgtgactggcagagccggcttcgtatagacagaaaaattgtcagcggtacctattcaaaaaatatcctgattgggcagtttggtttttgtgaaccggataattgtacttctccacaggtggtacaaaatgtgtatctatccctgaatattacggttccgcagacatgctccattaatgccggacaaacagtaattgtggatttcgggaatatatcaaccggcgcatttaaaacggcaggtgccagagcacagaatattaatccgaaggaaagtaccttatcggtgacctgcgataatattgcatcaggaacaaacctgaatatgcgtttacaggctaataacgttgcgggaaatattgtgatttccgataacagtgatgtcggatttattgttactgacagcagtgataaagaactgacacccaacagtctgtcgagttttattccgttttctctcgacggaaatacgcgggctaatgcacggatccgtgtttatccggccagcgtgacaggtatcagacctgatgaaggtccggtagcatcacaggcttatttacggattgatttcccgtaattctccggaggatacggataatgaatagtattaacagtaaattttccggaacagggaacataaaaggtattctggcttttatgttggtggttgtattcagcccggcagctgtttcggatatcggcagtattaacttaattatgaaagctaatctggtttctaatgcctgcactattacaccgggtacaatgaatcagaccgttgacctgggaacctgggcagtaaaacaatttcaggaaacaccacggggtgtgccgccaaagcagtttttcattgagctgattgattgcggccatctggcctcgggcgtaaaagtgaagttttcaggtacagtggatcctgtcaataataccttatttaaactggatgccgccagtacggccacaaatatcggaatttctgttctcgacagaaataaggatgttataaaacccaacacagaaacaattgtatatccgctgagaccggacgccaccaatattccgctggtattttatgcgcaatatgtcgccaccgctaattctgtcggggcaggaaccgctaattctcaggcaacctttacgctggaatatctttaatattaatttttcaggaacaacataatgataaagaataaattactgacaggttgcctgctggcgctggcttccgcacatgcattttccgcgtcacagccgggtttttatatgtcggctaaagccggtgccgggttattaaaaacaacagataattcgctacagggctccggtatgacagcgggtgcgttgtcatataatatcgaaaaagaaaatctgaaaaatataacggatactgttttttcaccggggatagcggtgggatatcagtttaccggtgatacttatcagcctgtccgcgttgaacttgcctatcagcactacggaaagcagaatgatacgatgtctttttcgccgtctgtttccggttactggcataatcagaaaaataatacctttcctttgccgtcagagtcttcgctgtatatgaaaacaaaagccgatacgctgatggtgaatgtctattatgacattccggtcaataatgatatcagtgcgtatctgatggcgggcgcgggtgcggcatttatccgtaatgatgtttcctgggataccaatgtggccgggcaggcactcagtgccggggcatcaaaaaatgtcactaatctggcatggtctgcgggggcgggtatttcgtggaatattaatgagaatatttcgctggataccgggtatacctataccgatgccgggtcggcagaaaacagaattgttgcccgcaacgggattaatactgcgacaggttataccaatacagatgtgaaattacatttgctgtatgccgggatccggtatcatttttaatccgttttccgtctctgcaaaataacagcagagacggaaataccccggataaaatatagcgtgattagtcgtaggtaatcataaacgtggcatccgcatccgcaatgccgggcgtcggacggtttccggtggcgatatagttggcataaaattgtgcctgaccgttgccgttaatatccatggcaattttcgggcttttggtttccaccggcagccggtttttctgactgtcgaggatctccaccgccactgagcctgcagcacttgctccctcatttattgccagcagtgagctgtcctgtttatctttcttaccgctgaagacaaaggtgacggcagaagaaggcggacagttctgtaactgaaaactgaacggcatggattgtgttttatcaccggcggcgcggaaatttttcagtgcccagcgccccagttcgacttttttatttgcctgggaaacttcgaccccgcaactgtaagcgacaatttcaccggacaactcaatattgacccggccgagttcataggcggcggctgaatggatcagcagaccaccgcagagcagggggagcagagcctgtttaatgtgtttcttcattgccgtgcctgttattcgtagtcaacgcgtaaataaccgcgggattggaaaacaccttctttcggtttattgccggtcacactgaccggccaggcggtaatggctgtccgggccgaaccggcgccgtcgagctggaacggaatgacactgccgatactattcggggttaatgcattaccgtctttatcgccgacaataaaaccgacatccgggttatcggagacaatcatattgccgtttgttttttcggcttcaatacgcagtgtcagataagctttcgcttccacgttggtacactgaatcgcgatattttcgagttttttattcactgtagcgggcttattaccggcaccggcctggctgaataattgtgagccgattttaccgaagttaatcaccacaatatcattaactccgactttgcattgctgcggtacattaataatgccgctgtagctgatggtataaaccggcgtacttaacgggtcagtatttgcggtcgtgacatagacggtaaataaggtctttttcgggataacaacctgatcaacgaaacggcgggtcactttcaggcggaaagtaaaattactgtccataatgccgaacggttttcccttggtcacgttcgggtgtgttcccatcagaacatagtcctgtggcgggtaaaatgtaccggcagagctgtcggtaatactcatcgccccgcgcagatagtcattcagctgaaggtatttataggagccttccgtttccaccaccggcatattggcgacatagctgcgcattgtccggttattgccggcgtggacagggcatattccctcaacccgctcgctgaagtttttggttaatacttttacctgaccgacctggttattggcagaggtaaagctgtcggtcagatcgtaaaagacctcactggttccgcccgccgcattactgcataccacagccagcgccggaagaggtaaaaatgccattaataacgggattgcgtatctctttttcatcattaactctctatttacattcaagcgcggtccgcagtaacggccctttgatttcctgacgggtaaaatcataatccgtggtgcactggtcaccaggctgattcccccactgcaccagtaatttcccggtcagcggcaggccggttaaatacacacgtccgtcatcatcggcaatgctgctgatctgagagccggtttcctgcaccatactgccgaagcggatcggtttgccgttgtgggtcagcgagagcagcgcgcggatcccgatactggtatcaaacgtggcgcgggcaacagccccgctgatcggtaccacgttctgcacgttatttttaatttccgtattgtcattaaatgaatccggattcagggcaatacggttattccggtatgccgaggcataaggaataatggcgtaaccgcgccagtccgttttccccccggtgtagttttccaccgccacaccggcggcacccggtgctttgaccagcaccgtggtgtcattgattgactggccgaatgtcaatccgttttcatgcagcagtactgcgccggaagcccggtagttcagctgattctgatccgggtcgtagttatagctgatcccgaaatcgccgtaagtgccctgataatccaggcccgctgagccgttataaccctgctggctgacatgtccctgtgagacggaatagctcaggtttctgtcttccagcagtgtgccgttcacgccgacgcggtaagcctcgcggccgccggagttattggtggcggagaaggtggcatacgcgttattaaaggcatcattactgcgcgcgttacgcgacgagaatgaggagaacggtacggacacattcaccgacagcatgttatcgcgctcattaagttccagcgctttggtggtgctcagggaaacagagtaatttatcccgttccagctgttggaatacccggcctgataccattcatccttaccgctgcggttccagtaagattgctggttaccggatatatagagcgagccgtactggtcaaatgattgcgagatattgacctggaagcgcccttttttgttatagagcaggttgtgatagttaataatgattggcttacctttatcaccatcctcgccgtccggggcatattcatagccggacatctgcttatacgcgacatcgtttaaggtatagaagcccttggtggaatagcggtaacccaataactggaacgtggtcccggtggtgttcagggatttcgcgtacaggaaacggaaagactgtccgctgtgattcgagccgtccgccagttcactgtttgcatgggtgacatcgaaggagaaggcaccaaagcggccgatgttctgaccgacacccaccagtactgatttatatttgtctgccagctgtgtcccggtatacacggagatatcccgtgtcagaccggcaagcagggtcgcctggacaaacttcggtttatcctggttgctgttaccgctgcggaattccccggccatcacatcatatttcacgcggccttcacgctggagtaccggcagtgtggagtaggggacaatatactgttgctgagtgccgtctttctcctcaacggtgacctgtaagtcaccactggaggtggccgggtttaagtcattaataacaaacgggcccggcgggacatagacctgataaatgacatagccgttctggcggatcaccactttggcatctgttttcgccataccgcggacggtcggggcatagccctgctggctgtccggatacatattatcgacagaaaacagccgcacaccacggaacccggcagaatcaaagacactgccgtccgagttgccgtcaccgataaccagctggcttttcagggcaataatcggccgctgaacatagttcatcaggctgcgccactggctgttactggtgtttttacttttgttgtaattccaggagcttgactgacggaactgccacgcaccaaggttaaaccccgagttcaggttcacgtagtagctgctggtattatccgagttgttattcccggacgcgaaatagttcataaacagtgccggaataccggattcccatctgtccggcggaatatagccgcgggcctgcccggaaagactggcctgagggaaactgagcatcagccgctgtttctgaaaatcaaagtgatattctgagccgggaattttttcggtaaacgggaagcactgtttatcctgctctgttaattcctccggacgggcgatatttaccccgaaacccataatggtctccgcgctgaagcaggggaataaataaggctcaccctctttatttttcagttcggtaaaggtgatttcagaggaggaaacaaaatcattattaacagacagttcaaccaggtaattaccgggcggctgatagccgcccgattcaaagcgggataaatcagaaacatccgcgtcagacaggtcatcggttaaaaacgcggcgttgaaggaaggcttcgcaccggcggttcccgcagggaaaaaacacgtaactgcggcaagcacagcaaaataaaccggcgtatgtgtgaaaacctttttgatgttactcatttcaccctgttccctgcatgacaacaataaaataatgaatgtcttaattcagattcacttcgcgctgtttgcgcagtccgccgtaatcattaattgtctgataagtcagtttacggccgtttttaccggcaatctgatgggtactgaatggcgcgaccatgacattctcaagcggacgcccgtctaaaataatattgacgaaggtggtgtaatacggcgtcgggttatcaatcgtaattgcaccgctcttctgcgtaatggtgattttttctgccgcatcctctgtctggataggtaagttcaccggtctgacgaacaatttaatccgtgacaaaatagccagctggagcacgttttttccttccagtgattctttatccacggacggaatcgcttttacgttcagccagaaaacagattcgcggtctttcggtaaatcctgagccaggttaacaatccgcagaatattttcgctggcaggctccatcacaaataatggcggtgtgataacaaagtctttctctttgccattgtcgttatcaatccatgagttgatcagaaaacgttctttcgggctgtggttaatcacagacagtgatgtttgttttgcatcctgaggataaatgacccgggttgcacccagtgcaatgcctgagttctgatttgacgctgaataagcaaaccctgacatcagtgtgaaaaacaatatcaatgcactatttttaaaataatcagaaatcacaaaagtacctcttaatattctctgtcagaaataacgcatagagtatggtatttcattttccggggtggcttataatacagaaggtgatatataaaactctctccgctccctgttacaggcacaatccgtcgtcagaattaagaaaaataatcctgtgcagagagagtttttatttatttaattaattacgttcggtaattgattattcgtatttaacaacgaaagtcgcatcagcatttgcctgacccggggtagttgcgcctttggcaacataacgggcagtgaaatctaatacgttagtaccttggattaaggttttagctgctgagaaatcagcaccgtttggtggtaatacggcagatgtggcatcgctgatctgaataccgacgttctgtgcagccggtgcgttagtcccggaggtaaccgctaataagttaacgtcgccggccatgctctggcctgagaatgcaactgcagcggtggttgccacagtaggatcacagtcaaccagtttgattttgaacggaaccggagtagacatagcacttccggttaaggtagctgtacggtactgacctaattccacagtctggttgctgctttcagtgctgactgcacatgctgcgttaaccagttccccggtaaaatgaactgtaccgccgtttacgattaccggatctgctgctgatgcagcagctgagaataataaagcggatacaacagatgcaccaataatatttaatttcataatactgaattcctaaaaaataaacgccatcttcaaattttactatctcaacagaatagtaaaccactacatctgaagaggttaatcttcagatacaatttgagtgttgtgtgtatcagaaatgaaaaaacgaaaaatgctaaaattaaaacatataatcccggctgttgttaaggtcaccaaacagctttacaaaaggcacttccagaacaagtgaaatagtaaacagcatatcaagcggaatattgcattccccgcgctcatagcgtgaaacctgctgctgacttaattttaatttgtcacctaattctgaaccggataatccctgttcttttctgtgtgctctgatttgttctccaacaattttatttatattcatcatgagtcgtactcaaaaattaccgggtttcttatgggaataatatgcaaggtattctgaataactaatcagataatacagacctgaattccgtcataattaaatatggcaggaaaagcgtggttgcatttcgggattaagtattagcgcttacacaggctaagtaaagttagttataacgatcaaaggccaattattgattgataaaaactatcaataatgattttttgatcgttataatcttttttggatgttaacaatttttactactaccaaaaaatcatgtttttattttacacatattatgtaattacctaataaataagtaaataaaattagcattacatttatatttcttttgtaagtaaaggttatctttgtttatgtcttaaagatgctgttttttcaattaaacgaatttaattgattgatttataacatataaaaaataaataaaaaatttaatcaataattttatttttaaataaaatatcaataatgtagttacgccaagtgtgaaatactgtataattcatttttatcgatattttattccagttcgttgttttgtttttaaggtaaattcatggattacactaaaaatgcgttatgactggcaaaactataaatttctgtgtttttttaaacataaattatacacaataaaaacatatatttcataatgtaaaattataaaaatcattatacttcatgatgttatatcggtttaaatacaaaacatctgaaatattacaaattattaccacaatatgtctgttcacaagtttaaagcgtaaatgcaaattaacacacattatgagtaattacaggccgaatagtaatttatccgataaaaaagacagaatatattgctgtatacaaaaatattatatcaatcatgatattgcggagtggtttacggcaagcctaaaggttattatcggcggttatccggaaaactttagatttttcggtggttgcgctataaaagcagaggggctgaacgccgtcatttttcattctgagaagggaggtaacctatgataccggactacacagaaagcaattttgccggtattgagcacggtgacgggatctcggtgatccgctttcatgcaccctggtgtgagccgtgccgccggtgaacatcagtttgatgaagcggtaacacaattcccggccgccgtccgggccggaaaagtgaatgtgatgcaggctccggtactggcggccaaatatgcggtatggggattgccggttattctgatctttaaagacggacaggagtttgcccgtatttccgggccgcagccggcttctgtcttcacacaagccgtacataatgcgttgttatagcatgaccgggatgtagtaattaatctcttccacatactgtaagccgttggcaataaactcatcatgccgctctgttggcagcagtttatagtgttcaatatccgggccccgtctgcgcagcaggttcatttctgccagcgtgccggaataggcggcatgaataatattgttgtaatcagcgggcagatttttcagcatggccggatcaatggtaattctgagataatgcccgcccggtaaggtcaccggagaaagtgacgcgcggcggatactgtccgctgataatacggacggaataaccgccgtggtataggcataactgatgtcatctgcggttgattcatacggggcatgtatggcatacaaatccgccggaataatatccacttccttaaaaaacttctcccagaattcacgccggaatttccggttctcagtctgccagtctgataaatttttgcggtgataatgatgagagcccgctaatgacatttccggtaattcagtcagttcagactgaaacggaatcaggttttccgcctgtaacggaaaacagaagccgttgctgtcccagccagctttcttgcggtaggcggagggggtggtattaaactgggatttaaaggcgcggcagaatgtctgctgtgaatcgaagcggtatttcacggaaatatcgagaatactgctgcgggtgatccgcaatgcttttgctgcacaggataagcgccgggcacggatatattttccgatcacgacaccggtgtgctctttaaataagcgctgtaaatgccatttggaataacccgcccgtgcggcaatgatatccagtgataaatcagattccagattttgctcaatccacaacaccagactctgaataatacttccgcgaagcccgtctatgttcattctttttattaccggtaaagagtgttatcgctcagttatcgcgcgatacaaaagttaaccttttaatattaaatgaatttaccttttatatccgcaaggagtgtaaatatctgtatgtagtgtgcagtagtttgtatttttttatcaggaattgtctttttttgtgtgaatttgagacgtacagacagaaaaatatcttgatccaccgaaaaacgtgcagctattaacctgaaaaacaacaaaattttaaaaaataacaaaaaattataacttttgaattttctgccgataacagtatccgtatggccctgccagatcattttatcgccccttaaaggaaactgtatgcagttacttcgaaacttatccatccggttcgtcatgctgtcgatactcggtattttgtgtctgacactcggatgtgtcagtttttacagtgactggtcactgtcgagagtgtctgacggcaatgcaaccgatcgtcagctagtccggcagctgacggtactgaatcagggaaatgaccagtatttccgctttatttcccggctgaaccgcgaaatgcagaaaaaagcggaaggggaagaaccggatttaaaaccgtctgcggaagcgatggagaatatggggctgcacctggcggagatgaaacggatttccccgggaccgatggatgtacagatgtcagaaaaagtgattgcccgctggcaggcactctatgatgagggggttaaaatccagatgcagctggcggagcagggggatcaggcgggttaccgtaagcagtcccatgatgtcacaccgcaactgagcaaagaattcggtgctgccagcgttgagttcacgcaggtggcggagacgcggatcgaacagacccgtacccttgtggacggcctgatgaccaccacgcggattgtgattatcagcggcacactgtttggtctgctgatcctgatttttgctgaccgctatctggtgaagatgatgcagcgcccgctgaacaatgtccgtcagcatttccgccgtattgccgggggcgatctcagccagccggtggaaagtgacgcagccgggcgtaactgtgtcggtaaattgttcccgctgctcagtgagatgcaggacagtctgcgggacgcggtcagttctatccgcgaaggcagtgataccctgcgtgacagtgcttctgagattgcgcgcggcaatacagatctctcctcgcgtaccgaacagcaggcagcggcgctggaagaaacggcagcgagtatggaagagatcaccgcgacagtgaaactgaatgcggatcacgcgcatcatgccagcgaactggcggaagtaacttcctcaacggcacatcagggccatgagatgatcgctgcggttatccgcacaatggacgaaatttccgagagttcacgcaaaattgctgaaatcaccaatgtgatcaacagtattgcattccagactaacattctggcgctgaatgcctcaattgaagcggcgcgggccggtgttcacggacgcggctttatggtggtggccggtgaggtgcggacactggccagtaacagtgcggatgccgccaaagagattgaacggctgatagccaatgcggtgtcccgtgttgatcagggcattaaactggtcgccggcggcggggaaacgatggaggagattgtccgtgcttccggtgaagtgacggagatcatgaaagaaattgccatagcgtcagaggagcagaccaaagggatcttacagatcggtactgcaatcacccagatggatactgtgacccagcagaatgcctcgctggtcagcaatgtctctgagactgccgccgggctggaattacagactcaggcgctgcagaactccgtacagaaattccgcctcagcgttgcggactgacgcggctcagattgctgccgtggccagtaaatcacggtagtaatctatctttctttccaggtgctgaaaatgatcattcagcaccgttatctgttgttgtaatgccccgctgtgtgccagcagtaaatccatacgcgcctgtgccgtctcctctccctgagcccgtaaatccgcataatgtctgatggatttcagcggcatgccggtttctttcagtcgtgtgataaacgtcacccactccgcatcacgggcggagtaactgcggtgattatttgcccggcgctgcgggatcagaatgccttctttttcataaaaccgcagggtatggatactgaaaccggttaaggcggaaaactcactgatggaataatgcatacagaaacctcttgacctcgagtgaactctatcttttacgctccgcagactaatgtcaaaggaggtttgtatgaacaatcagaattatgtggtgatcaccggtgccagcgccggtatcgggcgggcaatagcggccgcttttgcccgccggggtaataatgtggtgctggtggcacggcgtgaggatgcattactgacactgaaggcggagctgatgcagcagaacccggacatcaccgctgaaatccgcgtgtgtgatttgtccgtgcccggcaatgcggcggcgctctatcactcgttgtcttcactgaatattattgcgtggattaataatgccggtttcggctattacgtcatggtgccagagcagccggtggcgggagcggagaagatgctcgccctcaatgtgaatgccctgatggtattgtcggcgctgtatgtgcaggattatcagcatacggaaggtgcgcagctgatcaatatcagttcggcgggcggctatacgattgttccctccgcggtaacttactgcgccacgaagttttttgtcagtgcgtatacagaagggctggcgcgtgagcttatccgcagcggggcaaaactgcgggcaaaagtactggcaccggcagccacacagacggaatttggtcaggtggcgaataatactgattcttatgattatgaccgggctttcgggcgttatcataccagtgacgaaatggctgcttttgcgcttgaactgtatgacgcggacagtatcaccggcatgattgaccgcgatgatttccgttttcagctggcggatacccggttcccgcatgcggaaaccagccggtcaaatcagaaagtgactccataagattatgcgggtgcagccgggatgattgctgtcacccggcgttactgataatgtgaggaaattctcatttttcaggttggataccttttttatgctgcaattacttccggttacctcaccggttgatccggtacttgatgatattcgtccgctgtatgaatccgctttcccgctgcatgaacagcgcacgcgggcagggcgggagaaactgttttctcagtccggctattatatatatcagataagggataatgactgctttgccggatttaccggctgctggcagataggttccctgttttatattgagcacattgctattgcgccgcagatgcgcggcagcggagtcgggcaacaggcgttgtcacttttttgtcaggagaaacaacgggttgttctggagattgatccgctgacggatgaggtggcgcaacgccgtctgcgcttttatcagcactgtggttttgccgttaatgactatattcatcaccacccggcttaccgcccggaatttccgccgcatgagctggtgatcctgagttatccgcaggttattaatccggaagaatatcagcaatttaagagctttcttatccatcacattatgccggaaaatctgttgtagcgcccggctcaccgcatgttatgatgaccgcttttccggcggtcagcctgccggtttccgtaccgtactctgctgacagctgttgtcagcggggatgactttgcagggttgtcatgaacaagaaaaaatgtgcggtcagtgagctgctcagcggcatgccggatctcccgtttgaaacggtttctctcagtgagtgtgatttcacgtcggtgtctgtgtgtctggtggcaccggcagataccggcaacggccagctggcgcggatccggcaacagggcttcggccagcctgtttttatggtgctccgcgacggtgaaacagaggcactgccggacggtatcagcggagttatcgatctccgccgcgatgacagccgtacggtcggtgacacacttctgcgtgcggcacagtcctgtgaagagagcctgttaccgccgtttttcgggcggatgaaacactataccgcgcagcagaatatctcttttgcctgtcccggccatcagggcggggaatttttccgccgtcatcctgccgggcagcagtttaccgactacttcggtgatgcactgttccgggctgatctctgcaatgcagataccgcgctgggtgaccttctgatccacgaaggggcagcactggccgcgcaacagcatgccgcgaaagtctttcatgcggacaaaacctggtttgtgctcaacggcacgtcgtcatccaacaaagtggtgctgaatgccctgctgacaccgggtgatctggtgttattcgatcgtaataaccataaatccaaccaccacggcgcactgatccaggccggtgccacaccggtttatctggaggcggcgcgtaacccgttcggttttatcggcggcattgatgcacactgttttgatgaggattacctgcgggcactggcggcggaagccgcaccggaaaaagcgggcgacaaaggtccgttccggctggcggtgatccagctggggacgtatgacggcacggtgtataacgcccgtcaggtggtggacagcatcggcccgctgtgtgattacattttgtttgattccgcgtgggtcggctatgagcagtttatcccggtgatgcagatgtgttcaccgatgctgctggaactgaatgaaaacgaccccggcattctggtaacgcaatctgttcacaaacagatggccgggttctcccaggcgtctcagatccataaaaaagataaacatatcaaaggacaggcgcgttatgtctctttccggcagatgaataatgcctttatgatgcatgcctccaccagcccgttttatccgctgtttgccgcactggatgtgaatgcgaaaatgcatgagggcgaacccggacggcgtctgtgggcggagtgtgtcagaacggggattgaagcccgtaaactgttgctgcggacgtgtcagcatatccgtccctttatccccgatactgtggacggccgtccgtgggaagaggcggaaaccggtgttatcgctgcagaccggcgttttttcaattttgtgccgggcgagcgctggcacggttttgagggttatgcggacgatcagtattttgtcgatccctgcaaattattactgaccactcccggggtggatgtcagcagcggagagtatgaggatttcggcgttccggcgacgattctggcgtattacctgcgcgaaaatcagattgtcgcggaaaaatgtgacctgaattccatcctgtttttgctgaccccggcagaaacgccggaaaaaatgcagcggctgatccggcagatagcccggtttgagcagttgctggacagcgacgcggcgctggaaagcgtcctgccgtcactgtgccgcacgtatccgtcgcgttatgcgggatatacactgcggcagctgtgtcaggaaatgcacgatctgtttgtgaaacataatgttaaacagcgccagaaagagatgttccgccgccgctgtttcccggcggtacggatgtcgccgaaagcggcacatactgaatttgtccgcggcaatacagaacgggtggcggtgtcagagatagccggacgtatcgcggcggaaggggctctgccgtatccgccgggtgtcttgtgtgtggtgccgggggaagtctgggaagccccggttcagcgctatttcctcgcgctggaagagaccgccgaccgctttccgggcttcgcgccggaattacagggggcgtatattgaacaggatgacagcggacaccagcgtgtgtatgcctgtgttatccgtcatcagcagggagaaggacaatgacagcagaacagtttcatcagcgtatatgggaaattctggaagatctcaacagcgactattttcaggtagttgccgcccccgcaccggagccgcaggctatcgcagcagcagaggcattgaccggcgtaccggtaccggcgtattactctgcattctgtcagcgcaccaatggtctgtgcgtgatggcgcgggaggaattctggccggaagcggaactctattctgtgggaccggcatggacgttctggcgcggtgtggtattgctcggattcgatactcccgatctgccggagtgggcatccgtcacggcggcctgtgagcggctggctgattacgaagttaccggcgtgctgccgctgatgaaagtggtcggtgacggcaatattatctggggcctggataaatccggcactccggttgaggtggcggaaggtgaaattacccggctgccggcggactttaccgcatgctatgaggaacaaatccgtggtctggcagagcgtcagtcagaaatgatggagcggattgcggagcagaaacgccgtacggctgaataaatcctcactttccattcctgttggttatcggacgaatcagataactcattatacggactctctgtgctgtgatgtgataggggcagagagttcaatctgatgaggacatgataatgcctgttaacacaccttccgcactgcgggtcgccactgtgcagtttcagcaccgccccggcgacaaagaatacaatcttgcctgtattgataagtttattgagcgcgcccgcacggagcaggtgcagattcttgtgctgccggaaatgtgcatcaccggctactggcatgtgacaaaactgccggatgaggatgtccgcgcactcagcgagccgctggcggacagcccgtcactgcggcatctctgcgcccgcgcccgggaaaccggtatgattatcgcggcggggctgattgaagacggcggtgacggccattgctataacacctatgtggcctgtatgccggatggcacttatcatgcgcaccgcaaactgcatgcctttgagcatccggttatccgcagcggtaatcaatacaccgtatttgatacaccgtggggtgtgaaagctgccattcttatctgctgggacaacaatctggtggaaaacccgcgtgcctgcgcactgatgggggctgatatcattctggctccgcaccagaccggcggcacctgttcacgcagcccgttcggaatgaaaccggttccgctgacattgtgggaagaacgggataaacatccggaagcgttacgtgcggcttttcagggagagcacgggcgcggctggctgatgcgctggctgccggcaagggcgcatgataacggggtattttatctgttcagtaacggtgtggggcaggatgatgatgaagtccgcaccggtaatgccatggtgattgatccttacgggcggattgtggcggaaagtcaggcgattgaggatgacatggtggtggctgatctcgacctgacactgctgccgttgtctaccggacggcgctggataaccggccgccgtccggagctgtatcagatcctgacacagcgtcagggttatgaacgggatgcacggacagtccggtttgcggaagaagcggtggcagtcgctccggcggaaccccggccgaaaggatgattgcccggtaatgccggtcaggttatgctcatgaccggcatctcagacaggataatcagcatggatctgcgtttactgcgggcatttgtgactctggccggttgcggacattatcatgaggcggcatccgtcctttgcattacccagcccgcactgaccaaacaaataaaactgctggagaacagactcgggctgacactgtttgtgcgcgggcggcacggtgctcaactgacggcggagggcgctgaattattacctgcggccacggcgctggtgacacagagccgggagtttatgcatcatgcggcccggctgagccgtcagttaccggcgcggctgaatgtcgggttcggtatttcggcatttaaagaagcggctgaatttgtcagttggctgcaaaaaacactaccggatgtgcaggtgtctctggatgacttcccctctcaggtgatgactgaaaaattactgtccggcgaactggatatcgcctttatgcgtctgccgctgccggaaaatatggctcaccgcacggaagctgttgcctttaagcaggaaatattatctctcgcggtaccggccggaactgtagtgcagcccggtcaggaattgtcactgatcactcgtaatccgctgctgacattgtatgaaaaccggggcgcggggctgtatcaccagataacggcatttctggatgctaaccacgttaccccgctggccgtgcactacagcagcgatatccggacactgattgccctggtggcggccggtgccggtgtcgctctcctgcccggcgaagctggtgatccgggacatccggatgtttcgttttacccgctgactgactttgctcaggcatcatggaagatgggtatggtctggcggcgtgagttaccgcttctctggcggcagcagtggcgcgagtggctgacagtaaaagatcacccgttcggtttcagtaaacccgggagcccggtgtaaccgctgcgacgcggtgttatccggtgaggtatcggaggccggttcgcggcagccgttgacataatctgtccgcacagaggcttccgcaaacgcggcggtttgcccgtctgcggtgcagaggaaaaaggcacacagtgacagattctggttctattatgtattctccgctgtgtgagcaaatgcatgacaaaaccagtcactgacggcgctgatcatcgcctgatcggcactgtggcggttatgcagcagataaaatcctttgccggaatgcagtgtcagttccggaaacaaaggaataagggtctgctgtgccagttcatgttccagcaggaaatcattggcaatcagaataccctgctgatgcaccgccgcatcaatcgccagtaagaactgatcaaaatgcagccctgcggtgaacggtgtgccgccggttgttattccggcatagtgttccagccagctgtcccagtaaggatagagtgtggtgtgcagcagtaccgcgtttttcagatctgccgggcggtgaagtgacagccgcgcggcataagcgggatgacagaacagacggcagggtgcgtcagacaacagcacccgtgccggttgcgtgcgggataaatcagtatagcggacagccagatccacattgtctttttccagcgaaaccagcgctgcggtggcattcagatgcagatccagtcccggaaaggtgcggacaaaatcactcatcctgggagagaaccatttggaggccagcccgggcggcatggacagggtcagggtatggcgtgccgcatagcggattgtttcaccggcggcgcggatctgttccagcgcaggctgaattaagcgatagtatttctgtcctgtctctgtcaccgtcagcttgcggatttccctcacgaacaacatcacacccagctcctcctccagcttttttatctgctgactgaccgcgcccggtgttacatgcaggaattcagccgctttgataaaactgccgagccggacactggcttcaaaggccagtaatgctttcatcggcggataacggttcatgaaatagtttttctctttcataaggtaatttaaatcggttgtagcacagccccggattcagaacaatagccccatcagaaaaaaggggtagcaatagtatgaacagtaaaacggcagcagccttcgcgtttctcgggattatctggggaaccaactttatttttatgcgccaggcaagtgagtggatctcgccggtacagattgtatttctgcgggtgttatgcggttttgtgccgattgcggtgatggcgtggatgcagaaagcagtgcgccgggagcacctgaaatacaccggacatttcctggtgatggcgctgctggccacggtgatttattactgggcgtttgcttccggcacctcattactgctctccggggtttccggtgtgctcagcggggcaattccgctgttctcgtttattgttgcggcgatttttctgcgacaggaaaaaatcacggcgacgcgtctgtgcggactgatgctcggctttgccggagtgatcctgattgccaagccgtggcaggtcagcggggagagtatcagtctcgccggggtgggctatatgatcctgggatcactgagtgtgggaatttcctttgtgtatgccaaaaaattcctcgcggataaacagattgccccgctggcgctgacaacttatcagattggccttgcgctgctgatcctggcctgcatcacaccgtttaccggcatcaccgcgattgcacaggacagcaccgccagcctcgggctgattatcgggctgggattgctcggtaccggggtggcgtatctgacgtattactatctgatcctgaatctgggggcggtggtggcctcatccgtcacctacatcccgccggtggtggcactgattgtcgggttcctggcggccaatgagcagctcggtgtgacagaaattatgtcgatggtattgattatgagtggtgtcttcttattacagcgtccttcgcgccgcccggaagcggagaaggaagctgaagctgtgcagtaatattccgggaaaccaaacctatctttttattgtctgttcgatttgagttgcatttcctgccccgctgtcagtatcgcggggctttttttcacccgcaaactgcatcaccagcacacctgccaccaccaggccgataccggcgagtttggctatctgaaccggctgtttcggcattccgaacagaccgaaatgttcaatcagcgcggaaatcaccagctgaccggcaatcaccatcacgaaaaaggtaatgccgccgattttcggtaccaggatcagggcggaggtcagatacagcattccggctatcccgccgagccagatccagaacggctgatgcagcaggtccgcactcagtaccggcttcggaactttaaaaataaataataacggtgctaaaacaataatactgattaataatgatacaagactggcccataacggatgacccagatggcgtgctaacactgcattgctgaccgcctgtaccggcacaatggcaccggcaaaaaaagcacaaacaatcaaagcaatagcggataatgataaggttgacatagtggcctccttggttaacgttttattaacatcaatcataggtgatccccgtcagaaccggaaatgatcaattttatagagcactattcgtatcatgaataatataaagaaattagatttaaatcagcttgttaccctgcatgcgttgctgcgtgaacgccatgtcagccgggcggcggtgtctctgcaccgcagtcagcctgctgtcagccacacactgaaccaactgcgggatttgtttcaggatccgctgcttatccgcagacagggccgttatcacctgtccggtaaggcggaaacactgtatgcgccgctgacacaggctctgagtcagctcgatgacctgatcgcacagcaggatttccggccggaaaattgcacgcggcggtttaatatcgccatgtccgattacggggcggcgattttcagcgcaaaactgatccgttatctgcgcagtgccgcgccgcaggtcgacttacagatctggcagggcagccgcgaggagatgcaggggaaattgcaggaaggcagtctcgatctggccttcggggtatttacggccacggattacactctccgcacaaaaacggtctttacggacaccatggtcagtgttgcggacaaacaatactgcaccaacggcacgatgccgatggcggactggctctcgcacccgcatattctggcgagtatgaagccgtatgaagccaatgaaattgaccggcagttacagctgctcaattaccggcggcgcattgcggtctcggttccttactggcagattgcctcgcagttaccggaaggcactgatctgatcctgacggtggcgcagcgggcattgccggaaactctcagtccgtcattgcaggtgtttgagccgccgctgactatcgcgccgctcagttttcagatgttatggcaccagcgcagtgaaggggatgcggcactcggctggctgcgggaagtggtgatgcaggtatgtgactgacgctcagtgtgttgtccggcggcagttttgcagttccagcagaaatgagccgttattaccgccggtgcgtttatttaagccgaagacaaagcgccgctgtgacggtgtaaaataggccagcccgttgtaagtaccggcataaatcagggtatcttcgccgatctcctgcaaatcctgctgtgacatggtggcaaactgtttaatcggtgtcagtgccggggagtgatagggggacggttgcgtatccagcaccgtaaagcggtcattatgaaacagaacgacggattcacgctgtttatccggaaaataaaaatcacgcattgcgccctgttttcgctgataactggcggatgaaatctcacatttgtaatagccgttcagtgaccctccggcggtataaccggataaagagacaaaaaataataagaaagttaataaacgcataaacaggatagttgtttttacaaatattaagtgtaatcggatgcggttacccgcacaatcagttcagtacaatcttccggaaatcagcggaaagaataaagggctgaatacgtgtaaaatgcaaattttataagtacatagcgggaaagtttgtttccgtaactatcatcctgatcatatatccgtttatcagagatcggcgtaaaatagcagctgatatcattttttactgacggatccccctatgttggcgaagtttctcccgatttttctgcttgttctctcaaatatttttatgatgtttgcctggtacggacacctgaagtttgccggtaaaccccttattgcagtgatttttttcagctggctgattgcactggcggaatattgtctggcggtaccggccaaccggatcgggcatcagtattacagtgccgccgagctgaaaaccatgcaggaagtgatcactctgtgtgtctttatggtgttctctgtcgcttatctgggtgagagcatcacgctgaatcaccttatcggtttcggatttattgccgccggggctttctttatttttaaaggaccgttttaaccgccatcacacaatgacgataacgatactgtgaatttatccataatatagcgggatgactggttatatcaccaggtattattgccgggtatagcgcccggtttccgggatactttttcactctgatcaaggcaggtctgttatgtcatcattacgtttatcttatccgaaactcagtccggcagcctatgcggggctgattgcctgtaaaaatgcactggaaaacagcgcgttatcccctgaactggttgagctggtgtatctgcgggtatcccagattaacggctgcgcattctgtctggaaatgcacacggcggcactgcgcaagcggggcatgattcaggagaaactcgacgcactggcgggctggcgcgtgagtgaacgtttcagtgatcgcgagcgggcggcgctggaatggacggaatctgtcacactgttatcggctcagaatactgatgacgtaacctggcagcgtgtgaaggctcatttttctgatgcggaaatgagtgatctgacaatcgccgccgggctgatgaatgcctttaaccggattgctgtcagtctgcgccagtagcagatagcagcaacccggcaccggcggttattcgccggtgttatcccgcagccacggggtgatagtcagcccgacaagtaaaccttccgggctgagcagacgggtgacggattgtccccacggctcggttctgtttgccaccagcagcggatagccctgtgactgtaaaaattccgtggccgctgccaggtcgcgcacttcaaactcgacccacgcctgcggcaccggatgtgacggcggccagctgtcctgcccgaagcaggagactgcggcgtggctgagcggccagagcgcgaagtgcttcacgccgtgcagactgtgatcggcggtcaggtaatcaggcacgccttcagattcactgagcggcaggccgacagtatccgcaaagaagtgtttgctgcgggcggggtcgcgggtcaccggaccaaaaccggcgacaaacagcacaccgggaacggctgggtaatcagacatagcagtgtctccgtaagataagggtttatcccatcttacacattaatctgcccgggtgccggaaatatcatctcttcatacggtgcttcgcggcaggcatcaagccgttgctgtattccgccggaatgcgcctcaagctgatgtccgtccgggtcaagaaaatagacggaatccccttcactgcggttacgtttccagagtgttatctgatgagcggcgagaagtgagcggaaagccggaaacttttcgggaggaagggtaaaagcgtagtgggtataaccctgatgaataggccggtgaatgatttccgggtctgccgataaacagatccacaactcgccgcaggtcaggtaagcgccgtgtttccagcgggtatgcagcgtcattttcagaatatcacggtaaaaatgcaggctgcgatccaaatcggtgaccgccagggtcagatgattcattcctgttaacatatatcctccgtcagcatccggctgttataaacagcacgtctgagtcaggtgaaaggaagccgtatcagtggttgtacagtgggcggttatcatcatcaggaagctctcagggtaaaatatcagtcaggtttatgattaccctgaagcttactgactgacaacgcagggtgccagataattccgttgccgggcgttgtgatttaagatcacgttaatttagttccgtcagggatattcaccctgaatatgatttacctcaattatccttattattaataggtctactctggcgccacactttaataatgataatggtaggtctacttatgtcattagtcacacaacttccgtcgatcttttctgatttctccgatgcccgccaacagggctttctcactgtaatggaactgaaagagcagggtgtcccgctggtgggaacctattgcacttttatgccgcaggagattgctatggccgccggtgcagcggttgtctccctctgttcaaccagtgatgaaaccattgaagaagcggaaaaaaccttaccccgcaacttatgtcctctgatcaaaagcagctacggattcggtaaaaccgataaatgcccctacttctatttttctgacatcgtggtcggtgaaaccacctgcgacggcaaaaagaaaatgtatgaatatatggcggaatttaaacctgtccatgtgatgcagctgccgaataacagtgaaagtgcggaatctgtcgcactctggcgttcggaaatcatccgttttcagaaacggctggaagcgcagttcggctgtgaaattacagagcaggggatccgtgatgctatcgatctgcgcaaccgtgaacgccgtgcattacccgaattttcccgcctcgggcagctcaanaccgaattttaccgcctcgggcagctcaatccgcnccccccagccatgaccggccgtgagatcctcagtgtggtctatggtgccaccttcaaatttgataaacgcgctctgatcggcgagctggaaacgctgaccgccaaagtgcgtgcggaatatgctgccggtaaacggctggatccgcgtccgcgcattctgatcaccggctgcccgattggcggggcggggggaaaaggggggcggattatcgaagagaacgncggaaaaagtggtgcggattatcgaagagaacggcggctgggtggtcggttatgaaaactgcaccggggcgaaagccactgagcagtgtgtggatgaaaatccgcaggctgatgtttatgatgccctgaccgaaaaataccttgctatcggttgctcctgcatttcaccgaacacacagcgtctgaatatgctcagtgagatggtgcaggactatcaggtggacggggtgattgatgtgatcctccaggcctgtcacacctatgcggtggaatccctgctgataaaccggcatatccgtgaaaaacacgatatcccgtatatggctattgagacagattattccacctctgataccggtcagcttgccacccgcattgccgcttttattgagatgttataaggaggcgtcatgctgagtatcggtattgactcgggctcgaccgccaccaaagggattttgttcagtgatgaagacggcggcgtgatcctgcgccgcttcctgatcccgaccccgttccggccacagtcggcaattctggaagcctgggaaaccctctgtggtgaatgtgataccaaaccgtatctgaccctcaccggctatggccgcaaactggcggactttgcggacaaacaggtcacggaaatctcctgtcacgggatcggggcgcgctggctgcatccgcagacccgcacggtcattgatatcggcggccaggacagtaaggtgatccggcttgatgagcaggggcatctcacggattttctgatgaacgacaaatgcgccgccgggaccgggcgttttctggatgtgatcagccggacactcggcacggatatcacggcggtggatgatactatccgcgggattgagccgcatgcaatctccagcatgtgtacggtctttgccgaatcggaagtgatcagtctgcgatctgccggggtggagccggagtcgattctgtcaggaattgtgaattcaatggcacaacgtaccgccgggtttgccaagcggctgagtaccgtgccgtctgtgctgttcagcggcggggtcagccgcagtcagacattctgtgagcgtctttcacagcacctgggggcggaggtgatcacgcatccggacgggctgtttgccggtgccatcggtgcggccatttacggcatccgtcagttacagaaacaggcagccgtgacctccggggagatccgttcatgaatgactatctgattttatttgaaaatatgctcggtgtggtggcgatgcgcaagcatctcacggcggccgggcagcctttcaccgtgacggacatcccgccgtcactgggcaaagcctgtggcctggggatccgcctcagtgtcagtgatgattcactcccggcactgcgcgaccgtccgcaggtcacggaaatttaccgctgtgaagcggcggaatatgtgctgacggcagcggagtaaaccgcccttacagacagataacaaaccacaatcacgataatccggcattttttattctgatatgttgtaaaaaataataaaaatgaagggtcttattgtgagcaacgaaatacatagcatgatcaccactgatgctaatcaggcggtggcccggatggcgtatcagctgaatgaagtgatcgccatctatcctattaccccgagttccaccatggctgaatatgccgaccactggtccgcgaccggggaacccaatttgtggggcgatgttccgcgcatgatggaaatgcagtcggagggcggagccattgccaccgttcacggcgcacttcagaccggcgcactgtcgaccactttcacgtcctcccagggattgctgctgatgatcccgtccctgtataaaatcgccggtcagctgatcccgtttgtcctgcatgtggcggcgcggacggtcgcgactcacgcgctctctattttcggcgatcactcggatgtgatggcggtacgccagaccggctgtgcactgctgtgtgccaacagcgtccagcaggctcaggactttgcggtgatttcacagatagccacactgaacagccgcgtgccgtttattcatttctttgatggtttccgtacctctcatgagatgaacaaaattattgctgtcagccgtgcggagctgagcagactgatcccggcagaggcgatccgcgctcaccgcgacagagcactatcgccggaacatccggtaatacgcggcacatctgccaatccggatacctatttccaggcccgtgaggcgactaacccgtggtatgacgcggtttatcagcatgtgacggatgccatggccgcgtttggtgaggtgacaggccgttattatcagccgtttacgtattacggacacccgcaggcagagcgcctgattatcctgatgggatctgccgccggtccggcggaggaagtggcggacaaactgattgcgcagggcgaaaaagtcggcgtgctggaagtgcatctctaccggccgttctccgcacagcatttcttagataccattccggacagtgtgcagcacattgccgtgcttgaccggaccaaagaagcgggtgcccaggcggaaccgctctatctggatgtgatgaccgcctttgccgaagcgtatcagaacggggaacgggcacagctgccgcgtattatcggcggacgctacgggctgtcatccaaagagtttgatccggattgtgtgatggcgattttccgtgaactgacactaacttcgccgaaacgccgctttacagccggtattattgatgatgtcaccgggctgtccctgacgccggttccggcggaactgccggttactcaccgcctcagtgcgctgttctacgggctgggcagtgacggcacggtttcggcggccaaaaatgccattcagatcctcggcagtcacacagataactacgcccagggcttttttgtctatgactcgaaaaaggcgggcggccttaccgtttctcatctgcgcatcagcgaacagccgatccgcgctacttatctgatccgtcaggcagattttattgcctgccatcagtggcagttcctcgacaaatatgaaatggcggaaaaactggcgccgggcgggattttcctgctcaacagcccgtatccggccgatgaggtctggcaccatatcccgcaggatgttcaggcgatcctggcggagaaacaggcgcagctgtatgttatcaatgcctaccgtattgcccgtgaatgccgcctcggtgcgcggattaataccgttatgcagatggcgtttttccatctgacagccctgttgccggcagcggaaattcagtcttatttacagcaggcgattatccgcagctacagcaaaaaaggggaaagtgtcgttcaggataacctgatggcgatagcccgcaccccggaagccctgcatcgtgtgccgttgcaggcagtggatccgctcagtcagccgcgtccgccggtcgtgccggataacgcgccggactttgtcaaaaccgtcaccgccatgatgctggccggacgcggtgatgcgttgccggtatcggcattcccgccggacggcacctggccttccggcaccacccgctgggaaaaacgcaatatcgcagagatgatccccatctggaaaccgtctctctgtactcagtgcaactattgtgttgccgcctgtccgcatgcggctatccgcgccaaagtggccgatcccgcagatttcagcggcgcaccggatacactgcagcgtctgccggtcaaatcccgtgatatgaaagggatggattatgtccttcaggtcgcaccggaggactgcaccggctgtaatctctgttatgaggtctgtccggcgaaagaccgggaggatccggccatccgcgccattaatatgcagccgcggctggcacatctggcagaggaaaaagccaactttgatttcttcctgcaactgccggacactccggcatcgcggcttgagcgcattgatatccggacatcacaactgatcacgccgctgtttgaattctccggcgcctgtgcgggctgtggtgaaacgccgtatatcaaactgctgacccagttgtacggcgaacaacttctgattgccaatgccaccggctgctcctccatttacggcggtaacctgcctaccacgccgtacaccacgaataaagagggacgcggtccggcctgggcgaactcgctgtttgaggataatgccgagttcgggctggggttccgcctgacggcggatcagcacaaaaaacgggtgaaacgtctgctgatgacctttgcggcacaactgccggatgaattacggcagcggctgacggatgagacactgtctgcggatgaaaaacgtgcggctatcacggaactgcggacattactggcggagaatccggatccgcgtgcccgtgagctgtcagaggatgcgcattaccttctgccgaaatccgtctggctgatcggcggtgacggctgggcttatgatatcggcttcggcggactcgaccatgtgctgagcagcggcgagaatgtcaatgtgctggtgctcgatactcagtgttactccaacaccggcggccagcagtcgaaagccacaccgatgggagccgtcactaaattcggcgaggagggcaagggcaaatcccgcaaggatctgggcgtgtccatgatgatgtacggtaatgtgtatgtggcacagatagccatcggcgcgcagatgaatcagacggtgaaagcgattcaggaagcggaatcctatcccggcccgtccctgattattgcctacagcccgtgtgaagagcatggttatgatctggcattcagttacgaccagatgaaagccctgaccgccagcgggttctggccgctgtaccggtttgatccgcgccgtgagggaaccggtaaagcaccgctggtactggattcccgtccgccgtcacaatccctggcggaggtaatgcatcaggagcagcgttttaaccgcctcagcagcagtgacccggcgagagccgctgttctggcggaaaaagcggaacaacggacagcaaaacagtatgcactgctggaactgctggcctcgcagaaatctgaaccggccggaaccggcattgttcaggaggatgcctcaacatcatgatgataaatgatcagactgccggggagatatccccggcaacggagcaggatctcgctgcgttaattgccctcgacagcattgcggcacaggagccgcagcgctgtgaggcgatccgccgctggattgagcagaaaatctgttttgtgctgcggcgtgaaggcaaaattgccggttacggcgtgctgcattatcactttttcagctgcggatttattgagttactgatggtggatccggcgctgcgcgggcaggggatcggtagtgcattactggcggcattgcagcagcagtgccggacagaaaaattgtttacctctgtgaatacctcaaataccggtatgcaggcgttgctgctgcgtcagggctttgtgctcagcgggcaggtggataatctggatgacggtgatccggaactgttttattttcgcagactgagttgcagaaacgattaacaatattaattattaatcatattgaaactatttcccggatatattgcctgctcccgggtgaaggtaattaagagcaaactgatagccgggaaaatagttaatgattacattacaggctcaataacaatgcattaaagggatgtttaatgaaaaagttaattttagctgccggcctgttatcactttcttctgctgcattttctgctcagttatctgccacctgtgaagattactttaaacaggttgatggatatatggaactgctggccaaaaatgatgcaatgaaaggtcagattgataccatgaagcagcagtatgatgattccaaaaagcagtttatggaattaccagctgatgcacaggatgcagcctgtaaacagggtattgatgcgttagcccaggctaaagccatgatggaacagcaaatgccgaaataacggtcgctgtgataattgacgggctgtatgatacagcccgtttttgtttttcagcgggatgaaaactgtttgcggcgtttttcatatttcgccggattgcggtgaaaatgccgccagtgaggttcgcctgcggcatacagcagttcataatccccccgtgaatcgccccaggcacgcatatggtaagcggataaatcaccgtaaacctgttgcagccgggcaattttctggccgcagcggcagttgttgccgttgattttcccggtcagaatgccgtctttctcttccagctgagtcccgataagtttgatccccagccgctccgtaaacggcttcagcaccagttccggggatgccgaacagagtgtgacttccgcacccgatgcaatttccgctgccaccgcgcgcagaccttccggacgcatcatcttatgccagtaacgttcacagaattcctgtgcttttttctccacccagcgggcatcagtaccggtcagaaaggtggtgatcagcacttctttcagctcgtcgcgggtcagtttgcgtgagaagcagcgcagtgtcggcagaaccagacgcagcatccgcagggaaaaaacacgtttcccgaaggcaaaacgcagaaaaggaacaaaactgtcacggcgggtcagcgtgccgtcaaaatcaaaaacggataacaccggtttttctgacggggtgggtgcgtgcataaagaggtatactccggttaaataggtgatcgtgcagagtttagcattttttccgacaaaaggagacatctgcccggcttgtcccgcgctcataagttatttactatcagatattgattatcactatctgaattataccggtatacactgcgagaatatgatgattgcaatcagtgcctgtctggcaggtgaagccgtccgttacgacggcagccataaattatatgccccgctgaaagcgctgcagaacagcggaatggcggttccggtatgccctgaaatcctcggcgggctgccggtgccccgcgccccggcggaaatcaccggcggtgagggttgtgatgtatgggcgggtaccgcgcgggtaaccggcagcgacggcgaagatgtcactgatgcctttaaacagggagcactgcgggcactggagcatctgcaacaacgcaatatcacgcatgtgatcctgaaagccaacagcccgtcctgcggcagcggtctgatctacagcggcgcatttgatggcacgcttaaatccggtaacggtgtggcaacggcgctgtttgaggcaaacgggatcactgtctggcatgaagaccatccggaattgcccgcgctgatagaacagctgttacaaaacggaaaaagtgcatgataaccctgacacctgccagtgtgttaatccatgtgccgggttgaagacccgtttcagaatctgatagggttaagaggtgcttaaccgcagaaaggagagcagagtgatatatccggttgatttacatgcccatacggttgccagtacccatgcttacagtaccgtccgtgaatattttaccgaagcggcggagaaaggaataactctgtttgcgatcaccgaccacgggccggaaatggcggacgggccgcatccgtggcattttgccaatatgccggttttgccgcgcatgattaacggcgcggggctgctgtacggtattgaggccaatattaaaaatcaggccggagagacggactgcaccgataaaatggcgcagcagctggatattatcctcgccggttttcacgaaccggtgttgcagccgcaggggcaggccgccaataccgaagcgatgatcgccactatccgcagcggaaaagtgcagattattacccatcccggaaatccgaaatacccgctggatattcaggcggtggtgcaggcggcaaaagagtgcaatgtggcgctggagatgaataactcctcatttctgcattcgcgggcgggcagtgagaaaaactgccgggcgattgctgaggcggtacgtgaccacggcggctggatctcactgggctcggattcccactatgccggttatctgggtaattttgagcgggtggtgaccatgctgcgggagattgagtttcctgaagcgcgcatcctgaatgtcaccccgcgccgggtactggattttctggaatcacacgcacgaccgccaatccctgaatttgnaccgccaatccctgaatttgccggactctgaaaaaatgccccgcattgcggggctttttactgtttacttagcgcgtaaatcataattccagttggttttttccagcgcctcaatactttccaccaccagatcagtcagcgcatccagcattttttcgcctttctcaatgctggcgtaagtcggatcgccggtcgcaccggtcaccgaaacctcggtgatatcccacataatctgcacattatcgccgtggcggatgctgtcttccggcatctggcgcaccgctttgctcaggtcgcacagatcaggacacaccgcagcggtaatggaggattctccctcaccgccatgtcccagaccgttccattcacggaagaaattctccccgagacggccgccgagtacggaccaccaggccggcaggaacgcaaagaccacatctttatgacgcgctttgacatttcgctgcgcgatatccagcgacggaatattgccgtcgtggccattgaagacaaaaatgtgtttgatgccgtactgaatcaggctctcaaacatatcttccgcaatcgcaatcactgtttcaaagcggatattaatcgccatcggtgtgccgttatagtgcgcggaagtgccgaacggcacacccggcaccacaatcgtgcgggataaacgctgtgccgcacggcgggcgacggcttccggcacaaacagatccggaccgagcggcagatgcgggccgtggctctcacagctgccgaaaatggtaatggcactgtcaatttcgcccttatcgaaccggtttttcagttcttcagtggtgaattcattcagataaacttttttcattatgatctccctgtggccggtgaggtggcttttgccgccagcagcggatgcaatatcagataaataataacggtaataactaatgccagcaggccggtcggccagtcagacagaatattgttcagtgccatcaccagaccggaagccatcccggccagcgcactgatcaccccagcgtaattgtatttcggctgactgttaatctgtgtgatgtcgtagcggcatttgcgggtgatgtagtaatccgccagcagcggtccggccagcggcggtgccataatgccgagatagttaataaaatcagcaaagaagatctggtaaaaaccgatagcgcccagcacagtaccgataatcccggtggtcaggatcaggacgtttttattcactttcaccccgacggaatccagcaccggtccggtatagagcgagttacagtagagttccgcgtcgttggtggtccacagtgacagtgtccaggtgatcaccccgatcagcgccagcaggaagcttttctcaatcatccaggtaatgtagttcggcatcccgaccgtcatggtgccgatataaccgaccacattgagcagcgggttggtgaagataaaacaggctgccgagccccagaataccgcagaaatactcttattaaagcggaacagatccacgcccatcaccgctccggcaatccagctgccaaccaccatcgtgatcgcggtggagagcatcagcccttcattgcggttggaattctcaataaagacggataacccgccgccttcctgcaacatggcatagccggtgatcacggcgataatcataataatcggcgataccggaatagcgataatttccagtcctttcatgccgtgcagtgaggtgtacgtaaacagcaggccggcgacgacacaggaaagaaagacttccagggtgatcggcactccgctgtagccgtgctctgccgggttaaagacgatgatcccgctgggattacccaggaacgtgccccagatatccccgaccatcccggttattgccgcaaacccgccgagggtcagcagccccatcgcagtcatcggcaggttcgcaccgaaacggccataggaaaaacggctgatcagcgccaggctcagcccggtgcgttgcgccataatgccgagcagcgaggtgagaataaacaacaatcccatcccgatggcgatagccagcagcgccatcgggaatgacattcccggtccgccgttggccccggccagggccccgccgataaataacccggttgccacataaccgaaacctatccagaccagtacctgtttccaggtctcgcggcggtgtgtcatcggtatgggcgtaaacataaaatcgtggtcatgcgccggaggcgcggatgacgtttcgtgtttgctcatggtgtttcccctgtcttacgtggtgttggcagttgccgctaaaaagtgtttttaaaataaaaggccatgctcttgttatgatttattattagcctggtaaagtaattgtttgcaactaaattaatgaaaataaaaggaaaaggaaatttaatgtaacggacaggttgtcggtaaaagcggggagggaaatcacataaacgggaaggagaacaaaaaatcgacgaaaaatgctgccatcagaaataatggcagcaggatataaaataaccggggtggtaattattccggcagcggcaccatacagacggcactgccgaagctgccgtgactgcactcaacccggaatttgccgtaacggctgagaaatccgagcaggctgtcgccggagttaaaggtgacaatcccggtcaccggctgcccgtcagtggacatatgcggcatcaggctgtctgccagagcccgcttgattaatccggcctcggcggaggagccgatatagaattctgatttcagccagtttaccccggcggaaaccgaattcacgcccggagagcgggccgcggcaaacaccatcagtacccagccgttggaattctggctgtcggtcgcaaacggatgcgccaccatgttgtaagccgggttgtgcagggctttgcgcagctcagggtcacgcagcactttcagcaactgggactgtaaggccggcgggaagtgcagggtggcgatggtatttccggccaggtcatcatcaataaactgataaagcccctggatccacagctcagactgtgcggtgccgcaggtattgagattatgatacacccgccaggtgccgttcctttcccgtacggcataaccggcatgggaaaagctcagcccgtagtcactcagtgcctgaccctggcggaccagcagaacgacccggtcgccctgtttctccagccagtcattcagtactttggcctgtgcggtgcgttgtgcggcttcctgcggcgtgggcggggatttatccgcacagttctgactgccgctgtatgcaaggccggacgcagtgagcagggcagccgcaaaaacggatttcagcagtcgcatattatggcatcttctcctgatgggttaattcacgatcatcctgagttaccatatgggaaatgattttcccgtcctttttcagatatgcaccggggcctttttcggccggttccagtgtcagtttatcacccggattcaccggggttttctccagtttttcagtggcaaccagcagggcgacatcttcatttttatcggtcttgccggtgatggtggtgactttttctttcttattgttttccacagactccgcactcagctgagccggtaaaatgatcggcgataaaatcgcaccgcttatcatcacagagctgtagacactgcccgcactactgagtaccgcagtcgataaataaggattatccggcagtttacctgcattcgcaggcagtgtgaccagtgtggcggcacaaacgatggccggaaaaataaacttattcatgctgtttcccttaaattaatgaacaaatgttctttttacccgttcagacaccaggaaatacgaaatccagatgatagcgtaaataaccaatcttatcagcggataataaagagtgaagtcaacattaacatccagcagattaaccagcacgatttcctgaatggcttccgaggcgatggcaaaaagaataaaggcaataaacagctttggcagataacgggagagcctgaagaaataatacagcgttgtcagtatcagcagcatggtcagtacggtaaaagcaatattaatatacatgacctgcaatacgcggtcaggaataaaccccgcattttgctgatataaatcataccactcactcagtgagtaaccaccggcacccagtgacagaaaaagggtaattaacggcagccacagccagccgccgatccgcgacatccgtttttccgcgcactcatcacaatattccgcgtattgcggaatttctttttccccgcactgaatacagacccatttatgttccatacattattttccgttttcgtctttccggattatccggttatttgggttgatcgtttatccggctcatcagaatagcatcgacatagcgcccgtcgcggaatgcataatcgcgggcaatcccttcgcgctgaaaaccgaatttttcatacagcgccaggccgtccggattattggcaaatacttctaattcaatacggcggatgcccagccagttatcacaataatcaatcattgcctgcattaatgcactgccgacgccctggccgcggtagcttttatttaccgtaataccaaagttcaccacatggcggcggcgggggttactgttctgattaatacccagcagtccgaccaccacgccgtcaacaaccgccaccaggcgggtggctgactgatcaccctggctcatccggtgttcccagaacttccgcgaggtatacggcatctgtaaggtattggcataagacgtaaaatcctggtgcatatcgcacagcgccgccgcatcggaagggtcggctaagcggatggtaatctggcgcataaataatatcctttatgtaatactgttatattcccttattaatggcatcgaaatagtgtacccgtcaacggaatgaaaaagcctgaccgggaaggcgaaaatggcgtaaccgcgttttttcctgttattttctttttcacggatcaaactgtctgagaatgaaagatgacgataaaataagcggggtaacatactgacataagcaggaaagtgcattttctctgaaaaataaaaattcctgtaaaaaagtaggctaaccggcggcgggcgattacactgaatccttccggaaacaaaagggattgtcatggacgtccggtttcttaaatccgtattctgcaaatcaggtatcagccggatgactcattcagtacagacactggtttttctgcgccacggcgaaaaaccggataacgacagcggccagttaaccggcaaaggattaaaccgcgcactggcgctggcggatcttctgatcgcccgttacggaaaggcggatgccctgtatgccgccgcaccgaaacaaagcaagctcggcaattcgctgcgttctcttcagaccatcactccggtggctgtccgcctgtcactgccggtgcatctggaatttcacgccaaagaaaccaaagccctgcgcgatgcattgctggataaaacccatcacgggcatacggtctttgtggtctgggaacacgataatctgataaaagtggtgagggatattctgaaacagaccggcggggactattcggatatgccggcctggccgcgtgatgattttgacagtctgtggatactgaccattacccgcagtcagacagagaccaccgtgacattttcacaggaaaaacaggggctggataatctggacagttatttcccgcaggcccggtaaataaaccggaaatcagcgggaatacagactcagtcttcttttttcttacggctggcctctgctgcccgtttgcggcgcatttctttcgggtcagcaatcagcgggcggtatatttccacacggtcaccatcactgacaatatcagttagttttgccgggcggctgaaaataccgactttattctgcgttaaatccacatcatcccgtaatgctaaaataccggaggcaagaataacggcttccaccgtggcgccttcgtttattttcaccgggatcagaaactgtttatcaggcagggcataacagacttcaacagaaatatcagacacggtaaacctcttttgcccgtttggtaaatgccatcaccatattaccggccagctctttaaatatacggccgaaggccagctcaaccagtttattggtgaattcaaaatccagattcagctcaactttgcacgcctcaggactcagcggaataaacgaccagccgcccatcagtttacggaacgggccttccaccagttgcatacggatatgctgattgctggtcagctgattgcgggtcacaaaggttttactgatcccggctttggatacatccacagacgcggtcatttcatcctgatcatggctgataatacggcttcccacgcagcccggtaaaaattccggatacgcacggacatcattcaccaggttgtacatctgttccacactgaacggaaccagtgcggagcggctaatttgcggcataacacatcctgcggtcaaaaatcacgaaacggcggaaattatcgccgcctgttaaatcgtattatactgtgctccggcgcggagataaatgcacaatacggcacgcgctgatgacagaatgtatcttaatgacaacaaagatgtttgtcacaaaaagcacttgccaaatcccgctgacatgttaaaaacagcgtacagggacagaaaacccgcaaaggcgcttaaaatagcagcatttaccgtgcgacggataaataagcaatttatttcgggtgtgcataacgtataatagtggtcattatgacaaagaaaaaagttcacaaaccaggctctgccaccatcgcgctgaacaaacgcgcccgccacgactactttatcgaagaagagatagaggcaggtctggcgctgcagggctgggaagtcaaatcattacgcgcaggtaaagccaacctgggggatagctacgtcatcctccgagacggcgaagctttcctgtttggtgccaacttcacaccgctcagcgtggcctcatcccacgttgtctgcgacccgacccggacacgcaaactgctgctcaaccagcgtgaactggacagcctgtacggcaaaatcaaccgtgacgggcacactgtggttgcactgtcgctgtactggaaaaacgcctggtgcaaagtcaaaatcggtattgccaaaggtaagaaagaacacgacaaacgcgatgacatccgcgaacgtgagtggaaattagacaaagcaagaattatgaagcacgcagggcgttaagtactggtattccgtactgattttctgatatactgcgtttcacaacttggggctgattctggattcgacgggatttgcgaaacccaaggtgcatgccgtggggcggttggccacgataaaagccgcaaaaaaatagtcgcaaacgacgaaaactacgctttagcagcttaataacctgctctgagccctctctccctagcctccgctcttaggacggggatcaagagaggtcaaacccaaaagagatcgtgtggacttcctgcccggggagaaagcattaaaacgaatcgggctagtttgttagtggcgtgtctgtccgcagctggcaagcgaatgtaaagaccagactaagcatgtagtaccgaaggtgtagaaatttcggacgcgggttcaactcccgccagctccaccaaaattctccatcggtgattaccagagtcatccgatgtagtcgaaagcccgcatggcgcaagccctgcgggcttttttgtgtctgtcgttgcctgagatctcaaaaaatgcatggaactttatttcagggatacttaaaagaactaaaacaattagtaataataaaactccgaaatgtgttttttgaagaaataatcaatagaatgctaccgcagaagaaacgactactactctcgggctattaatgatggaagctatgacagccagcgaaaggggctcagcaaaaattgaatcattaggtgaaatggcctacaataacggatgccatcaccttgggatccttagtctctacacgatagtcacgcttgtacgaggtgtacaaggctcgccgacagcttgtcggcgtcgaaagaaaggagcccggaatgaaacagaaaactgtgctggttcaccagtatctgcgtttccgttttggtcgctgggagcacgtgtgtcaacacatgcgctctttgccgaactgttaacggttaatcccagggtgatggttcctttctattgttaatcaagcatattttgtcacttctcccatcattgatgtataatgttcttcatctttcgccgcctcaaatactttcttaaaccaagtaagataacgttcaaccgatgccccttcatgaagagagatattgcgagcgtcttggtgagaatgcctgttcagataacgggcaaatatgcgaaacccaggttcaccttcaggtccgttggccagtgtttcaagcgctcggtgaaggggttcacttttccccgaaaaaccaaaataatattcaaggatttgccgcatagtatttgggatcacaacactggcaatgtcatttttttgggtatggcgcaagacataccatagtgcctgatagtcgttcagtaattctttttcagaaacaggagaagcagaactatgcagggatttggatatccgataaagtgtccattctggagggcaagaacccgcaggtcttttctttctttccgcagaaagtagcaactcttgaaagaaaaataggctgtgcgtcagaataataattttttcagcaattctagctcgtataatatggtactgaatcagtgaagcaatttcgaaaacataattttgtgataggctggatatagggtcgtcaatgactattaaacgtgttcgttggtcattgtcatcgcgactttttctccctgtgcaagtctctagaaaatagagaaaagcaattagcgtcttttccccctcactcaggctactaaaaactggcgcttcgctgttctcaccttcccgaatcagacgataatcatcccgaccttcatagggagcaatatgaaacccagttatcccgagactattcaaactgcaattaatccgatcaatcgtttcatgagtattgacgataaggctggatttatcgttaataattacggtcagagcattaagctcggtcgagatttttttctgatattccgttaatttttctgactcctcagcaaactccgctaattgtttatcatgactagttattgtatctgttgccagttttcgtatatgaccgagtaacttctgtttcagtcttagccgctcaacatgataattgtcagcctttcggttatgttcaccaattaccacattaatatcagtaagctgcgctgaaatagcattttcaagaacagaaagatcttcaagagagatcgacatcgaaggtgatgttaatttatcatcaatacacagtttgtttctctgatatgcctgttccagttcaagtaaatagagataaacaggatgttcctgatcaactaacggacacgcttttattaactggcgcatatctttgggtttatcgcaccaggattgatatcgatcctggagttcccgcaactgccccatcgctgcttcccatgaggtatcaaaaagggcggtaatttcctgttgaagttgctgggtatctattggtgtttgacaaaatgggcaaatatcatcaatcagccacgactgcccattcctcacccagtcaatgttgcctaattgattaattgcagcagcaaggcggctatcacctgttggaataagaggttgtatcaataacgtaatgtcggtttcattcaaagggaatgctggcaaggcttcgagtaaagcataagggttacctctacttgcctcaagtttgtgcaattcttcagccaattcctgtgttgatgtatcttcaatttcagtgtgttctaagattgtctgataaagcttatcggtttgtttggttccagccattaaatcccataaatctgtttttctgatttctgcggtggaactataaatttgttgtgctgattcacttttaactctttctgacatactctcaacatcacgtttttgtacatccaaagcatcgctatcagcacggaggcgtttgcattgtgcttccagagtatctatttcagttttaatttctgcattttcactatttaaagtgaaaacgcctggttgagaaggttgactgaaaatatcatctacatactcctgattaaataccaggtagttcatattcaacggaggttgtaggttgcactgactgtaatcgggtcgaccatgcttataaaagtaaccggaaacggttgattttcctgagccattttgtccatagataagagtgacatacttactcaagtcgaattccacaggcttttcaccctgataactgcgaacgccgtggatggagagaatagccatgctatatccttattaccatctgccgtatttgggcattttatctctaaaatttcctacagcaaactactaaacgaatatccataatagatcctgcaaacaattctgaatattacagggtcaaattccataacaatcacgatgtcgaaatgtaagtgtcccacattatcgtgcgattcacattcagagatcctcctgtatataataaaaactcttccatagttaagggctgaaaggagaaaactgataatcaactatatatgacccaatagaacttgtttttgttgtgacccaaaccgtatctgtgcctttctgagtcgccagttttgcattatcaatacaaagtaatttccaccgttcagtgtagacttcttttatccatatgccgtgtttgcaccggccaaatctgttggtggcagggcccggtgatgtaattttatattcagtctgatagtgaatggttttgtttgtcagtaaatacgccatcacatcgaatacagggacaattaatatcaggccaaagaatccactccagagaaagcttttaaatgcctgttttatcgggcgacgccaaatactccaaattccgccgattacccccacaatagcagcgaaaatgacggaaatagtccactgagggaaccattcaaataacacaacgctttggcctaaaaacatagaccaatacatgaatgctatccaaataccaaaaggaaccagaatgaagaaaacagaggaaaattttttcttgttgctctggccatatgacctgagttgattgtccataattctttgtataataagtaggttttacttgattgaccttgttgtttttaatattttttgtttatttaatataatactgatttattaaatattaatgcggttatgttgttaatgcaaacaggaaatttgttttttaaattactctgtctgtttatgatgttaatagttaacattctgaatgataagatcattttttgtatggaaaataaaaagcatcagtttaaaatctgtgtcagtcatcatagctgatgcttcccggaatgattacaatggtttaattttcttctgaacaggactccccatgacaccaaataaccgaaaattacctgtttttaaatatcatcccgatccgcttggaaccggtgctttttcagacgataagacagttaagtgtgattgctgtcagcaagctactgatatctactatgaaagtccgttttattctgtcgctgatattgatgcattatgcccgtggtgtattgcggatggttctgccagccggaaatttgagggtgaattccaggatagcgccagcgtagaaggaattggctgtgaatatgatgacgatggtgaattttcacacaccactaacccgtatccggatgaaatgctggatgaactggttaaacgcacgcccggttaccggggatggcagcaggaagtgtggctggcacattgcaatgagccctgtgaatttatcgggtatgtttgctgggatgatataaaagaccggctggatgaatttgtttctctggaagatgatattcaggaatatggtttttctgttgaagagttatccggcctgttacataaggacagtgatgctcagggatatttattccgctgtctgcattgtaaaaaattacgcctgcattttgattttagttaaaggctgcagagcggagcaattcagctccgctttcaattaaaaaacgccgcgagttaaaacgtcctgtattacccttactgataaaactccacatcctgcaatgtattcaactcctgctcaatacgttcgcggctgctgagtaatacactaataatctggttatttttttcatcattactgcggaatgtcgggacggagacactgatggcggcgataattttattgcgctgacgtaatgaaacggcatagcagcgggtttcttcgtttatttcccggttatcggtggcgtaatgatttattttgacatcttccagctgctgacgtaattccgcaatggtggtgatactgtatcttgtcagcggggtaaagccgtcaggatataagcgaaaaatatcgtcatcgctgtaatggcatatcatcgctttgcctaatgcggaataaactgccggtaagcgggtgccgatattggagactaactgaactttctgggcagactgcactttatcgatatacagcacatccgggccgtctaatatgcccatctggcacacttcgttgcactcgttgacaatattattcatctcacggtgcaccattttcagccagtacgatttttcaaagaatgaacgggaaagaatggagcaggcgatacccagaaaataaagctgggtgttttcgtcataattaatataacggcgttctgccagcgttttcagaatcgggtagagcgtgccttttaagatgccggtcttcccggccagctgcgtgagggaaatcccggtgttttctgccgccagaacactgagtacctctaacacccgtattgtcggcatatgctccgttgacatcaattcacctccctgacagtttatgccgttattctaggtacaaagccccgctaagtaaatcatgtccgggtgtccgtttgtgacattgtccgccggtgtcacgacaatccgctttattgttcctgtaatgtgctgctcctcacagataaataataaataaccgcaatccggatcgggtttttccgcagatatagttttcaaccgcaattaaaacagcctgttagcctgttttttcagcaaatgtacaaaatttgactcactctgagtttcatgattacttacctgtgtttttatttattaacgaggtttgtatatatgaacaatgtgggtatggaaagccgttacatcacgccggccgtaacaatttttgatgacaaaggccggattgataccgaacaaaaccagcaggtgtatgactctctgaagaggcatgtctccggatttgtggttatgggcagtaccggcgagtttttttcactggatatggaaagctcaaaaacactgatcaggttatgcggcagttatgacaaagggggaatgaaagtgtatgccgggaccagccgcccggatgtgaatgagtccgccgcgctggcgaactatgctcatgagcagggtgtggacggggtcatgattatcagcccgtactatttcccgctggatgatgagggcgtttaccggttttacagcgcggtcgcggaaaaaacgtcagccaatatttttatctataacttcccggaacgcaccggttactcggtgtcaccggcggtgtgtctgcgtctggcggatcgctatccgaatattatcggactgaaagatacgatccccgatacattacatacgtcgcagattattcagacggtaaaaaaagagatcccgcattttgaggtttatgcaggttatgacaataacttcgcccatgttgtgctggcggggggaaatggctgtatcggcgggttatccaatattgtgcctgagttcttcgcgtcctggatggaggcattcgcacagggtgatatggctgccgcagcggcacatcagcgcaaagtggatcagctgatggccgtttacggcgtgcactcaccgtttatcccgacctttaaaaaagcattacagatgcggggcattattcagtcagactactgcacagcgccattcagcagcctgaatgcggagcagactgaacagctgatgcagatactggcggatgctgaaacagcacgctgatttttcctgattataacgacagaacatcttaccgacagggaatattatcatggcgactatcacagcttatgacaatcctgctttaaattccgcgattcagaaatcgtggaagcgtttagtacccctgatgtttattttgtattttgtggcatttattgaccgtgtgaatgtgggctttgcgaaagatgccatgcaactggatatcgggttatccgattccgcctttgcgctgggggcggggattttcttcgccgcttatgcgctgttcgggatcccggcaaacctgatcctcaataaaatcggtgcacaaaagtggctgagtattacaacggttatctggggtgtgttatccgcaatgaccgggttcgtgaccaacgagacgcaatttattgtgctgcgtttcctgctgggactgggggaggcgggtttttatccgggaattttattactggcctccatctatttcccgaataaagtccgcggctcggtgattggtatttttgtcctcggcgtaccgctggcgctgactctcggttcgccgttatccggcgcactgctggaattacacggctggatggggcgtccgggctggttctggatgtttgtgattgaaggtttaccggcggttgttatcgggatcttcgcctttttctggctggatgacagcccggagaaagcccgtttcctgacagcggaagagaagaaagccctgacagagcaactggccagtgagaatgcgaaaacagaaaccacatctgtgctgtccgcactgaaaaatatcaaggtctggcacctggcgcttatctacggcaccatccagatctcggtttacgggctgatgtttttcctgccgtcacaggtggcttccctgatgggacagagtctcgggtttaaagcgtctctggtggcagctattccgtgggcatgctcggcgttcggtgtgtattacatcccgcgtctggctgataaaaatccgtcccgccgtgtggctatctccgtgatgtgtatgctggcagcggcagttggtctggcactatccgcctttgccagtccggtctttgccatcgccgcgctgtgtctcagcgccgtcggttttctgtccgtacaaccggtgttctggacattcccgccgcagttactgagtggtcccgcgctggctgccggcatcgggttctgtaccaccatgggggcattctgttctttcctcgcaccgatcattcgtgtggaaatggataaactgatgaacagcaatacggcggggattatcacactcgcggtgatcactgtcggctgtgcactcctgattgccttactgaaaaagaacacacaaaaataatcctgattcgttgccgtcattttggcggcaataaccggaaggtgagttatgcaaaagatattacgtattgatgaaactgataatttaatcgtggcactgaaggatttgcatgccggtgaagtgtatcagtggggtgatgagtcagtcacactggtcacggatgtgaaagccaaacacaagttcgccctggaagcagtgccggaaggcggcattgtctccatgtacggcaccgctgtcgggaaagcaacaaaaccgattgcccgcggggaagtgattaccgtggataatatccgccattatgccgccccggtatcactggaagagagcggcgactatgagtggcagatcccggatgtgtcggcctggaaggaccggacatttaaaggttatgtccgtgatgatggccgggtcggaacagctaattactggctgattttcccgctggtgttttgtgagaaccgcaatgtcaccaagctgacggatgcgctgaatgaggcgctgggctacaccaataacagcctgaaaagcttcgccttcgatctgaccgccggtgaacaggcgcagaccgcaaagcccaagctgttcccgcatattgagggggtacgctgtattacggtgaccagcggctgcggcggtgccacctctgacagtaaaaccatgtgtgatgtactggctgcgtatgcggatcatccgaatgtgatcggtattactgtgttcagcctgggatgtgaaaaagcgcagcgcaagatgttcaaagagtcgctggcggcgcgtaatccggcatttgataaaccggcgctctatttccggcagcaggaatggaacagcgaagaagagatgatgcagacggcgctgaaacaaacctatgagtgcatgaaagcagtgaagcctcagagccgtacggatgtgccgctgtcatatcttaagctcggcgtgaagtgcggggcgtctgacgggttctcgggcatttccggtaatccggcgatggggctggtgtctgactggctggtgacactcggcggcgcttccggtctggctgaattcccggaactgtgtggtgcggaaggggatatggtaaaacgctgcatccgctttgaggataaaaagaaattcctcgatctgatgggacagtatgagaaaaccgcgaacttctttaataccactatcgcggataacccgagccccggaaatattgctgatggattaattaccgatgcgattaaatcaaccggtgcggcgaaaaaaggcggaaaatcgccgatcagtgcggtgtgtgactatgcggaaccgatgccggacagcggactgtctctggtctgcacaccgggaaatgatgtggatgcggtgaccggattggtggctgcgggctgtaacgttgttattttttccactgggctgggaacaccgacaggaaaccctatcgtgccggtcgtcaagatttccaccaacagcgctatcgctcagcgtttgtcagatatgattgactacgactgcggtccggtgatagaaggtgtgccattgccggaaatcagtaaagggctgtttgagcgcgtgattgaaacggcaggcggggaatataaggtgaaagcagaccgtctggagcagtttgatttcctgctgtggaaacggtcactggatttataaaaagtgtactgtcacacagataaataaaaaaacggggaatattccccgttatcattagtaatgacttattcttgacctgattaactttattcattgtcagtgggtaaacccgagtcttgctcaggtgaaccgtaaagaaaagagaacaccgttttgaggtaaagtaaatagcttaattcattggtatgaaccgtcaatgttcagaggtttttttacggcgtattacttttttctttgtcaaatcgctttcacctttgcgcccattaaatacataatgtacttcacaacagactctgtactgagagaaaaactttgcaagcagcaaatgtaactcacgagcccatgaaagacgttcaacttctgtatcaaaaaaatggcgaataaattcagtattctctctgagatgaaaaatattatttctgtatatccggagtggatccgaatgttctttcatcagttttcttatgctatccgaaattggtaataagtctttaaagctggcagggcgatcattttcaagcaggactcgtatgtttaactttcgaaagccctcacagaccacacctaaaaaacctaaccatgcagaaaaataaattctcgtatcaaattcttcccgctggctcagatggccattttttttcattttctgattgagtttattgtaatttctaaacatgagttcagctgtttcgaagtaatgaatctgaagtgtcagtacacggtcatgattgcggcatggaagcatatcccccaggtttctgctatctatgtctatagcgtaagagtatggaacattggcaatatagcaaagatcatgatccggacgaatcagttctccgtcacttaacgctttgttcagatgctcagcaacatcatcataatttctgaaaccgtaagctgttatattcttcccggcaaagcaggttaaccaccaggaattaaaacctcctatttctccgtgctccccgaaatcaaaatctatattcccggaattcagttctactaggcatccggcgccatgtttataatatttaataccaccatctaactcaccggaggcgggtatagcatatttaatccattcatagctacttgacggcattttaatgccagaccgatacatgagctttaaagcagtccggacattatttttaaactcaacaatcaagcgataaagattttcattcatatcacaagctcacttcatcctgtttgaaaaatgatataatcacaaaagcctcggaactaaaacttcccgccttccgtctgaaaatggttcgctgatgattcccagttcttccatttcctcaacgattctggcggcgcgattgtaaccaatgcggaattcccgctgaatgccggatatcgaaacctgttgtttttctgtgataaactggacagccctgtcaaacagaggatccaaatcacaggcgtccggtacaactgttcttccggtggtaagataattgacatccccccattttttgcagtaatcaacggcattatgtatatcactgtcgctgatatatgctccctgaatacgctgtggctctgcggaatcagcggtgataagtaacatatcaccatttccggataatatttcagcgccatgtcgcccgataataaaatgagagtccgctttggaagttacagtcattgcaatgcgggcagggatatgaaatttaagttgctggtttatttttgtcggcagcgggctgcgtgttgtgagcaataaatgaataccagtcattcctccctgttgcagcagaggtaaaattaaatcttcaatattgttattatcattaatcagctgaacggcattttcgatacagataacaatggccggtttatgactcagacggggatgtttctccatacagtcttccggccgccagaaaggatccggaatgggtcttccgaatgattctgccagggcaattttttcattataacgccggaggtcaggggcatttattgcggagaattgtttgcgtcgtatttcggcttccgtagtcagaaaacgcagagcttcggttatttcagtgctgtcagacagaacaggaaaaagtaaatgcggcgtatcacggtaaaggctgagttcagggtggtgagcatcacacagcaccagccggacattcgcaggagatgtccggtacagcaggctcagtaccagggaatgcatcagcatggatttaccggagccggttgttccggcgatcagaaggtgcggtaattgtgttaaatccagactgacaggctcgccggttatattttctcccgctattacagaaagctgcggcagcgatttatcttctgtccatttagtaaaacagtggctgaaggagacgattttccgggattcattttttacaagtaatccgatgtacggtgttccggggataaaatcaatcatccggatttcggttacattcagagagcgacataattcagggataagagcggaaatttgtgaactgcgtattccgggggaaggggctaaccgaaagagagtaaacatcgatccttctgaataatccactactgccgattcaagacgatattttaataagcaggatgcgattagcgctgcggtcttttctacaacagccggtgattgtgtcactgtttatccttaatcagagagagtattcacttacagtcatcgttccatcctttttggggaaaggcaagacactatatctgagataataattaagataaaaatggcactatcgtgtaatgatatatcgttatatatccgaaaaatatgcagtaaaacgatatacggagagataaaaaaacagggagtattccctgtttttttattgctgtgctttgttatcagatatcgttatcagacataaaacttcatggattttttgccgaggcagaagctgataaacaggccgagagcacagaggaacagaatatagtaggcgataaacatcgggttaacgtgttcggcaatgaccggtacagtgaaggtggtcagcccggcgaacagggcgttaccgatgttataagagaacccgatgccgcttaagcggatattggccgggaacagtttgatgataataatcggcacacaggcaaccagacccaggaacagggcggccagggaatataagaagccgatcgtggtgtggtcaccgctgcccagggaattaaagaaggcatagctggtggcagcgagcaggatgctgtatatcacaacagtttttcggatgccgagtttgtcggacacaatccctgcgataatactgccgaccatgttcatgacggtggcgaggatcgcgattttactgacaaattccggatcgattttaaagatatcggatttcatcaggtttggtgccaggacgaccagaaccacaccggtggtcagcagccaggtggcaagaatagagatcatcgtggccggtttgtagctcttcagtacctctttgattggcatatcaatcagttctttgcgctttttcatctccaggaataccggcgtttcacgcagatagcggcgtaaatacacggcaatcaggcctaaaaccccgccgcagataaacggataacgccatgcgaaacttaagatctggtcattactgaaattggtgtaaatcaggtaagccgcaaagtggccgataaccacgccgaatgtcaggccgctggcaatcatactgttcgccaggccgatgcggttctgcggaacatgctcggtgacaaagacgtgagcactcggcacttctccgcctaatgcgatgccctgtaacagacgcataatcagcagcagtaccggtgcggcatagccaatctgctcataggttggcagcaggccgatcagcagggtcgggatagccatcaggaacagggagagcataaacatttttttgcggccaatcaggtcgccgaaatgtgccatgatcacgccgctgagcgggcggacaaaataagcgaccgcgtaggtcagataggtcatgatgctcgaaagcagcggtgagtcactcgggaagaagagtgtctgcaaaaagggtgcgaaggtgaggaatacgataaagtcgtaaaattccagcgcaccacccaaagacgcaagagtcagcgtttttccgtcctgtagctttaagcgattagacatgccattaaccttacttattaaacatgcgtgaaaatgaaataatcgtgaatactagcacgatactatcagtcagtgagatatttctgaaaagttaattatactaatgatttatatccacttttataatgtggttaccctggtgatcaatatatctccggctaatttacggaaatataaggaaagtaatgtttgagtatcatgattattaccaggatggaacagagaaaataccggagagtgataaatcatagtgatgaataattattcgttataaatccgatgaatggattgtgtgcggcgggcaggccggtaacaccagtcagtaacaccaaacctgaacagataaatggacaaaacccgctgatccgtaatatatcagcgggttttttgttgttaaccacacgttgtttcagcgtgacaacaggtaatcagtcagtgacagtttcactggcgatttcacttgctgtttcgtcaccgccgtcaggcttgtaattggtgttcgtgatttggctcagtgtaccggctgagtcaaagaccagtgtcagtgtttcctgttttaccggctcatggcccggttcacggcggaagacataataccaggtctgtgttccgaacgggtcacgtaacatcggggtaccgagtgtataggcgacttgctgttgggtcattcctttctggatcttcgccacgtctgccggtgtcaggtagttaccctggttgatatccgggcggtaaacgacacgctccagagtggaacaaccggcagttaacagcaacaaagatgtcgttgcggcaatcagcaatttacaacgcatggtgatttcattcctttaggattctttgtgacgatgataatcgacaataatcaaattgaaaacctttacatttttctatgaccgcaggatcgcataaaagttagatgaaatcagcttgtttgtcatgctgccagcaattcttttgcgctggcaagggtatttttggtgacggcagcgccggcaagtaaccgggccagttcctgtacccgcgcttttttatccagcaactgcatggcggtttcagtttcagtgccgttggtgtgtttgctgacaaagtagtgctgatgtccgcaacccgcaacctgtggtaagtgagtcacacacatgacctgtgtggattcgcccagttcacgcagcagtttcccgacgatagcagctgtcgggccgctgatccccacatccacttcgtcgaaaatcagtgccggagtgtccattttcttcgcggtgatcacctgaattgccagtgcaatacgggataactccccgccggatgccactttcgccagtgcctgatgaggttgtcccgggttagtggtgacattaaattcaactctgctcgcgccgtccatactcagttgttccggggtaaaaattacatcagcggtaaagcggccgtgcggcatggataaatggtgcatgctctgtgtgataagctcacccagttcagcggcgtagtgctctctgaccatatgtaactgctgtgcaatcgtcagggcctgctgatagtactgttccgcttcgcggctaagttcttcgctgtgctgttcactctcctgctgcatctgctgctcttcctgcaactgtgcatacaggacatataactcttccggcgtggtgtgatgtttgcggctcaggctgatgtaacgggagattcgttgttcgagttcatacagccggttcggatccagatccacgcggttactgtagtgacgcagttcattactgacttcatccacctgaatggctgcttcttccagcatggtcagtaacggggacaggctttcatccagagagatcagttcgctgagttcatgacgggcatgattgagcatgctgatgatattgttttcatcattttcactgagaatgtttaaggtgccctgactcaggctcagaaactgaccggcattcgccaggcgtttatattccgtatcaatatccgggaattccccttcacggggttcaaattcgccgagttctttcaggtgataatcaaccagttgccgacgggcttcccgctccagtgcctgctgctgatagagagccagcgcctgacaggcgttgtgccattgttgccacgcttttttcatttccccgagcagtaagccctggttggcataggtatccagcaggattttctggtggctgctttccagcaggtgctgatgggcatgctgcccgtgaatttggatcagcagtgtgccgagctcacgcagttgtgacagtggtacggctgtgccgttgataaaaccacgggaacggccgtcgctgttgatagtgcggcgcagcaggcattcctggttatcatccagctgatgttcctccagccagagacgggcggccggagtatctttcagggagaagcgggcgcagatatcagcgcggttagcgccggggcgcaccatattggcatccgcgcggttaccgagacacaatcccagtgcatcaatagcaatggatttaccggcaccggtttcacctgtgatggcggacataccggcgcggaagtcgatttctaactcgcggacaatggcaaactgactgatggtgagctgggttaacatgccgcctctcctgtggatatacacatacctgtttttacatacagtataatcaggatttgtatccggtaaagaggcggaatgaaaaaaatcagaacatttttttagaccagccgagttttgtgcttaacgtattgaaatagttatagtctatcgggtgtatgagatcgagcgttttgctgctgcgtttgatcctgaccacatccccttcctgtatcggcagcgctatctggctgtcacagctgacttcatagtcaatgttggtctgcggaaatttcagggtaatggtgctgtggctgctgatcaccagcggcctcgaggagagggtgtgcgggaacatcggcaccagggcgatagcatcaagattaggtgtcaggatcggcccgcccgcagaaagcgaataggcggtggagccggtcggggtggtgatgatcaggccgtcagagcgctgggaaaaggcaaagcgttcgtcaatatagacctcaaaatcaatcatgtgggcgacttttccggggtgcagtaccacttcattgagcgcggtgctgcggcgcagtttgccgttggggctgagtaccccggcatcgagcagaaaccgtttttcgacgtggtattccccggtcagcacgcggtcgagctgctggagtgcattgtccggcgcaagatcagtcagaaagccgaggttcccccggtttacgccgatcacatctgcgccatagcgggagagcacacgggcggcaccgagcatattgccgtccccgccgatcacaatgaccagatctgcctgctgcccgatatccggcagcgtgccggtgacggcatcggtcagccgcatttcagcggcaacatcactttcgacaatcacacgcagaccttttttcagcagccagtgatacagcagttcgtgtgttgccagcgcttcaggatggcgcggatggccgacaattccgatacagcggaacgatttgttttttgcggtattgtccgtcagcatgtgcgttttagcctcacttaatcgccattcccttgaatctctgagtttgatccccataataaacaagaatcaggattattgcgaaatacgcggagattttatgagtagtcacgaacaaaaaacgcacgaagaacctgttgcagatgcagcggagaccctgaacacggcagcagagcagccggaaacggagcaggcggatgccgccgcagcggcgcaggcccgtatcgcggagctggagcatgagctggaagagtcccgtaaaacggaacgcgaagcgatgctgcgcgccaaagcggagattgaaaacaaccgccgccgtatggaacaggatgttgaaaaagcccataagtttgcattagaacgtttttctaatgaattattacctgtgattgataacctggagcgcgcactgagtgcggtaaatccggaagatgaagcacagaaaagtatgctggaagggctggaactgacactgaaatccttcctggatgctgtgaaaaaattcggtatcgaagtggttgaagagacaaaagtgccgttcaatccggatgtgcatcaggccatcagtatggtggatgctgcagatcacgagtccaaccatgtggtgacagtgatgcagaaaggctacaccttaaacggccgcctgctgcgtccggcgatggtgatggtctctaaataaggatcgtttcacacgcaacggaatgccgccgcaagggcggcatttttgtctctgtactatgcgccgggctgaagctctgccgggatcaccggctgccagtcgatggggacctgaccgcgctctgtcagaatcgcattggtttttgagaagtgaccgcagcccagaaaaccacggtgtgcggacaacggtgacgggtgcggtgctttcagtatcacatgcttttgctgatcaatgtactggcctttccgctgggcatgtgcgccccagagcaggaaaatcacaccttcgcaatgggcattgacagccgcaatcacattatcggtaaaggtttcccagcccagtttggcgtgtgagtgtgcctggccgcgttcaaccgtcagcacagtattaagcagtaacaccccctgttgtgcccagctgacgaggcaaccgtgattcggccgggtaaatcccgggatatccgcttccagttccttatacatattcacgagcgacggcggcggctgaatgcccggcagcacagagaaagagaggccgtgtgcctgattcggtccgtggtacggatcctgtcccagaatcaccacccgcacatcagacagctccgtataacggaatgcgttgaaaacatctttctgtggtgggtaaatggtcttaccaatttctcgttcatgagcgacaacacggagtgtttcaatgaaatagggctgggttttctcatggccgatgacatcatgccaggtcagtgatgcagacatcgtgtcgttatccttcatttattacaagagttgcattcagcttacctgacttatccgttgttaggaaataagaagggatttttttgcgggtccggttctgataaccacaacggcagggcgaaaatggctgattttttacaaaaaaacctgaaaatagcaaaaatgaaattttgatttaaaacaggcttttatcatggtggttaaaaattgatatgatttttattgatatatatcaaagaatcacccctgtattcttggtatataagatgcagagacattggttagaccaatattccaagttaaatgacaatcaataaattgataacgaatcacccggaggtcatcatggttactggtattcaaattactaaatccgaaaacgctgcactggttaactctttctggctgctggatgacagcaaagacgaagtacgctgcatctgtgcaaaagaacaatatgcagacggtgatgttgtttcccgtgccgcattaggtcctttcgagtaccgcgaagtgaatttacaggttcagcctaccgtccgtgttgagggtggtcagcacctgaacgtgaacgttctgcgtcgtgaaactctggaagatgctgttaaccatccggaaaaatacccgcagttaactatccgtgtttccggttatgcagtgcgtttcaactcactgactcctgaacagcagcgcgacgttattgcccgtacttttactgccagcctgtaatcgttccggcaacagtccttgttccgaaaaccacgctccggcgtggtttttttatgtctgccggataagaatgtcggtaactaactgataataaatgatattgttacggcgtgatgaatagcgttaagtgaagccttctgtatccggggaggtatacttatgttgattgaacactatttttcgcagttactggctttttcatccacgccgcattgtcagtcacttttgcagcggcagcatttaaccgcagcggatttattgctgccgccacccgccgggatccggcaggatggttttcccgatgatattaccctggcccggctgtgttcggacagttatcagcccggcagccgcgacatcggcggtgtcagccgttcggatgcgcagactctggcttcgctttcgctgacggaagagcagttacgcagcccgtccggcctgcaaagcatgatttatcattaccgcgataccggtattctggcgtttgcgggcagtaatgatatgtcagatatgatgaccaatatccgccaggggcgcggattaccggcccggcagtatcaggaggcggtgtcgctggcggcacatcttttgtcgcagtctgtttgtccgtggctgtttgtcgggcattctctcggcggcgggctggcatcattctgtgctgtggtgctgcagcagccggcggtgatattcaatgcggcggggctggcggaaaatacgctggcggaagagggcgtttctctggtgacggcgcgggcgcgcggggcagagcttatccgtcattatgtgctggagcatgactggctcacgcatatccaggacgggctggatcttccgaaagcactggggcagcggatagcgctggagtattatccgccgcagcatgcgcattccgttttgcagaaactggttctcggcgtgaaggcacataccctgtcgcaggtggttaccgcgatggaacagatggatgaaacccgggagtaagcataaaaaaacggactgtcacttcagtgacagtccgttttcttttatcagagagaaggagttccgtttattcctgtggctcagcggccgcaggagtctgctccgcatgatctgcgcctggcttgcgtcgttttccgatatttttactgacgcggtgacggattttggtttttttcttcttctcagtttcagcggctttctgctctttgcgcttggcgagcacttttttcgacggtttgtgcgtcgctttctccgatggcgcacgggttttcggccgtaactcatcaatcacgcgcattttaaccggctcttcaatataacggatgattttgccgagcagcggctggtcgtgggattccaccagtgaaacagccacccctttgcgtccggcacgggcggtgcgcccgatacggtgcaggtagacatctgcggtgcgcggcaggtcaaagttaaatacgtggctgatatcttcgatgtcgatcccgcgggaggccacatcggtggcgataagcacagtagcacggccgtcagtcatgcggctgatggcttcgttgcgtttcgcctgaaccatctcaccttcaagatagcaggagacaatatcctgtgtgcgcagccagtcagacagttcacgcacgcgctcacgtttgcggacaaacaccaccgttttggtgacatccggttgtttcagcaaatgtgcgagcagagctttcttgtgctccaggtcatcggcacgcaggtagaactgctggatttttttgcgctcacggcgtgacgggtcagcttcgatctcaaccggctcgttcaggatccgtttggcgaaatcgcggatagcctgaccttcgagggtggcggagaacagcatggtctgtgtgcgccagcgggtttcaccggcgatagtttcgatatcgttggcaaagcccatgtccagcatgcggtcagcttcgtcaaggatcaggatctcaaccgcgcggcagtcaaagttctcttcttttatatactgcagcagacgcccggtggtcgcgacaacaatatcctggttctcactgaacacttcggcgtggttcatataagccacgccgccggtgatggtggcgacatcgtgatgggtgaactgacagaattctctggcctgatccgccacctgcatagccagttcgcgggtcggggtcaggataagcacgcgcggcggcccggattttttacgcgggaagtcagacaggtgctgaatggccggcagcagataggcggcagttttgccggtgccggtcggggctgaacccagaatgtcacgattatccagcgcagccggaatagtggcttcctggatggcggtcgggcgctcatagcccttggcatccagtgcgcggatcagttcatcgttcagttcgagttcagaaaaagtagttgcagtcattatatacctctgtttggaccgctgattataaacggcttggacaggatcttcatcaaaaatagttgtcagcgtgcgggactttcttctgcgggcagaagtccgtatcctgtcgccgggttttctttattttaacagacaaacagttccgtgatgatgacaaacgaaaaacaacctccgcgccgccgtggttttgcctgcaaacaattttttgtggcccacgaccgctgtgccatgaaagtcggtaccgacggggtactgctcggcggctgggcaccgtgcgaaagtgcccgccgtattctggatatcggtaccggcagcgggctggtggcgctgatgctggcacagcggtcattgccggatacacagattgatgcggtggatattgatgctgacgctgctgcgcaggccgcagagaatttcctcgcgtcaccgtggagcggccggatgaaggtgtttcatcaggatatcggtgagtttaccgctgcctgtccgcaatcccgctatgagcttattgtcagtaatccgccgtattttgccccggcggtcgcctgccgtgacagtgcccgggaaaccgcccgttacaccacatcactggaacatcctcagctgctgcggcatgcggcacaggttatcacccctgacggtctgctctgtgtggtgctgccgtacaccaccggacaggagtttatcgctgctgccggtgagcagaactggtttctgcacacacagattgcggtgtcagataaaccggatacgccttttcaccggatattaatcgcattatcgcgccgtccggtcagtgcgctgcacaaaacgatgagtattaaaacggaagaaggcgcttacagcgctgatttcaaatcatttatcaccggtttttatctgaaatactgaactgcgtcattgtggcggttacggcggggggtttttttttttaaaaaaaaaannnnntgcttttttcagtcaaaagcagattttacaggatatttacactgtcctgcggcaattttccgtgattatcagagggattaccgctgaaaacgtggtaatctgtaacgttaattgccggaaaaacaggctgcggataaatacgcaggatttatccggaaaatatgtagtgaggatcacaaaaaggatccttttttgtaatttttttaaaagaaaaatgaacttcgctattttagctgactcaaagtatcgcttgctcatgatgaagtgaagcgaaacaggaaagagaatggtgaagctgagcttcgggagataacactgcgaatgagcgagcagttaacggatcaaatgctggttgatcgggtacagaaaggggatcagaaagcctttaatatgctggtggtacgttatcagcacaaggtggcgagtctggtatcccgttatgttccgcagagtgatgttccggatgtggcgcaggagtcctttattaaggcgtaccgcgcagtcgggtcatttcgcggtgacagtgcattttatacctggctgtaccgtattgcggtcaatacagcaaagaattacctggttgctcaggggcgccgcccgccgtccagtgatgtggatgccggagatgctgagaattttgaatcctcaggggcgttaaaagaaatttcgaaccctgagaacttaatgttgtctgaagaattaagagcggtggttttccgcacgatcgattccttacctgaggatttgaaaacggcgattacattgcgtgagctcgatggtctgagctatgaagaaatagctgagattatggattgcccggtcggcacggttcgttcccgtatcttccgcgcacgcgaagccatcgataataaagttcagccactgatacaaaatcagtgagcacttaaatcacactgaagggaacgtaggcatgcaaaaagagacactttccgcactgatggacggagaaactcttgacagtgaagtggttaccgcactgacacaggatgcagatctgcaggcagaatgggccggttatcaccttatccgtgatacaatgcgcggcgacctgccggatgttatgcattttgatattgcgtcacgggtagctgaagcactggcgcaggagccggtttatatcgcacctcaggcgatccctgagtctcagcctgaaccgaaaacatggcgtgattacggatttgtggcaaaactgcgtccgtgggccagtcagttaacacaaatcggtatggcagcctgtgtatcactggccgtgattatcggtgttcagcactataataccgacggcacagagagcgtggttaacggtgatgcatccgcattcaataccgttccgtttatgggcagtgcgtcaccagtcagcctcgatctgaaaaacggcgccggtcttaccccgcagacccgttttgatcaggagcgcggtgcgcgtctgaatgcgattttccagcagtatgaactggatcgccgtgtacacacggatggtcagcctgaagttaaacagacagccaccccggaacagggtcgcgcgtcttcacaaccacagcagtagtaatgaaacgaatctggttatccgttgcttttctgacgggcagcctgttactcgcagcacctgcctcagcacaacaaagtgctgaggcgttgctgcagaatatgggtaacgcttcccgcacactcagttatgaactctcttttatcaccatctccccgaaaggtatcacgccggtccgttaccgctatgcggttatggatggccagcctgtcgcccagattatgcagatggacagctcccgccgggaaattgttcagcgtggtcaggagatcagctactatgagccggggctggattcattcagcctgagcggtaatcacattgttgattatctgccgtcgattattttcgcggacttcaatgcgctgaaagcctattacaattttattgatgtcggacggatccatatcggcgatcatccgggacgggtcgtgcgcatcacctcaaaagataactcacgttacaattatattgtggtggcggatgaagaaaccgccctgccgctacaggtggatctgctggatcagaataatgtctcactcgaacagttccgcgtggtgtccgcctccgtgaataacagcagtgtgacagaagcactgaaagcggtacagtctgtcactatgccgccggtactggctattccgcagccggaaaagatcaaatttgactgggatgtgatgcgtctgccgaacggctttaaagaaatgacccgcaaccgccgtcaggtgggtgagcaggaatgggttgagactgtgatgttcagtgatggcctgttctcattttccgtgaatgtcgccaaagccgtgaagacagcagaaaatcaacagacaatgcgccagggttcgcgtacgctctacaccatacgtaaaggtgataatgagatcactgtctttggcgaactgcccccggcgacagcccggcagatagcggacggtgtgacattcagcggaggttaatatggtcagagagtgggcaaccgtggtgcgctggcaaaacgggcgcgcggtgctgcgttacgggtcatctgccggatgcggcagttgcaaagcacgggcggcatgcggctcatatctgctgaataaactggggccggaagcggagcatcagcttgaaattccggtcagtgaaccgctggtgaccggccagaaagtggaagtcgggatcccggaaggcagcctgctgcgctcggcaatgctggtgtatctcacgccgctgctgggtttatttgccggtgcggggctggtgcaggcactggcggaaagtcagtctgcggttctcgcgggtggcctgctgggcggtgctgccgggttcctgctggcgcgtaaaattgcccgtcactggagcggctcagcggattatgagccggttatcctgcaaatcggcctgccgccgtcagagctcagcattgatatgtgtgagtcctgatttatcagggctctcctgttgtaaagtatgccggtcatgatttgaccggcattttttttaccgcgggaatgtcagtgattcctatatttttcttatgccgctcaggtagcatgaggaacttccgtgtaagaaaatatcctgatgagtgagggcagtaatgctggtacagacagtaaaggattaccgtttttcaggcagacaaaaaatgtttcaggggagcagtgccggaagctccgcctctccccgggagttggtttttcagttaactgacctgatgactcagctttccgttaatgtgctggatatcagttttggtaccggaacattaggccggatgattaaagcaaacccggatacattctactggtcggtcgatggtgtggacgggtttgaaccgaactgctataaccagacattatttaatgatgatatttaccggaatgtctggcacggactggcacaggatatcccgcaggaattatttgccgggtatgatgtgatttgtctgccggatgtgattgagcatctggacagagacaccgctattgagctggtcagatatatcctgaccaacatgaatgacaatgcccgcttttttatcagcacgccattgtggttttatccgcaggacacaatacaggaaggtgatctggaaaagcaccttatcggtgtgccggtatcctcaatgatggcaatgctgccgcaaatgtattcagtgaataatccccttatcggcgggtttatttacggcaaagtcagtcttgattatgc

SEQ ID NO: 39 - DNA, 19262 bp, unknown
  Altogen 322075 strain
cagttgccgatcacgcggattattattgcgcaccgcgagtcgacgattgagtcagcggacaggatcattaatcttaacaatcctgccgcttaagtaatggcttaccggtaaaccggcaacaggctgaaactcgataaaatatgcaccaccgcgttcagtaccccgaaacccaggatcagccagatcatgggctctccgccccagacccggaattgcgggctgccgaagcgtttacgggatgcgcgggccagcagtgccgggacaatcgccgcccagaccgtcgccgccagaccggcaaaaccgatggcgtaaataaagccgttcgggtaaatcaatccgcccagcatcggcgggataaaggtgacaccggcggttttcaggcggccaattttgctgtcatcaaatttgaacagatccgccagataatcaaacagccccagcgtcaccccgaggaacgaactggccaccgcaaagttcgagaacacaatcagcagcagctccagtccccggctgtgcagtacaccgctcagcgcctgaaccagcacatcaatattaccgcccttctccgcaatcggaataaagtccggacgcggaatattccccatcgtgccgagcatccagatgatatagagcaccagcgccatcagcgtaccgattgtcagacagcggcggattttgccgggttctttgccgtaatatttcatcaggctcggcacattaccgtggaacccgaaagaggccagacaaaacggcagcgtaaacaagacataaggcagataagaagcgtccggctgtgccacgttcagtaataccgccggtttcacattccacagcaggccgccgaatgtcataaagaatgtcaggattttggcaccgagcacaatcgtcgtcatccggctgaccgctttagtactcagccagacaataaaggcgaccgccagggcaaacagaaatccgcccagccgtgccggaagcgtgatccccgcctgtgcaaaggtgtggctcagcaccgatccgctggcggaaatataggcataagtcagaatatacaggacgaacgcaatggtcaggccgttaataatattccagccgtttcccagcagatcgcgggtgatcgtgtcaaaactggaaccaatccggtaattcaggttggcttcgaggatcattaatcctgagtgcagcatacaaaaccaggtgaataccagtgctgcaatcgaccagaaaaaccatgcaccggacattaccaccggcagggaaaacatccccgcaccaatgatagttccgccgataatcattgctccgccgaatacggacggcgaaacagaggacgcaggaacagtagccataagagtacctctggtggcttagtattatcattatgtttgaaatcaggaggatgcagcgcatcctcctgtaagacgacagggttacatgacaggtttcaggcgggcgacaaagtgacgcagaaccggtggttcataggtgaatgtcagccctttgatatccgccgctttctctttcagccggataaaggcatccgcgatataatccatatggtcattggtatagacacggcgcggaattgtcaggcgcagcagctccatcggtgacggcttctgaataccggtttccgggtcgcgccccagcagcagagaaccaatttccaccccgcggatgccggattccaggaacagctcattattaagggcatgcgccgggaactgatcgcccgggatatgcggcagcattttcttcgcatcgacaaagaccgcgtggccgccgaccggatactggatcgggatccccgcttcgcgcaggcgctcacccagatattccacctgggtgatacggtagcggagataatcctcatccatcccttcttccagcccgatagccagcgcctccatatcacgcccggcgagaccgccgtaggtgacaaagccttccatcggcacacagcgggtgcgcacttcgttgaacagatcttcatcatcacggaaacagcacagaccgccgatattcaccagtgagtcctttttcgccgacattgtcagcatatcgccatatttatacatctctttgacgatctctttcaccgacttatccgcatagcctttttcgcgctgtttgataaaccaggcgttttcacagaaacgggcggaatcaatcaccaccggaatatcatgctttttggcaatgtcatacacggctttcatatttgccagtgatatcggctgaccgccggagctgttacaggtcacggtggtgacaattgcggctacattttttgcgccgtgctctgcgattgccgcattgagcagatctaaatcgaaatcccctttccagtcataataggttgttgtatcaaaggctttcggtgtgaccacgttaatcgctttcgcgccgtttaactccacatgggcagccgtggtatcaaagtggaagttggagataaagaccggtttatccgccccgcctttgcggcggcgggcgatcagtgacgggaacagaatttgctcggcaccgcgcccctggtgtgtcgggatagtgaacgggtagccaatcagttttttcacctgatcacagagatgataatagttacgggaaccggcatacgcctcatcccccatcatcagcccggcccactggcggtcactcatggcaccagtaccggaatcggtcagcaggtcaataaagaccacatcacccggtaataaaaacgggttatatccggcttctttcagggcaacttcccgctcattacgggtggtcatacggatattttcaaccattttaatacggaacggttctggaatacgtttcattattttactctccggtttcgggctgccggatatatttatccgctgcatttttctgaaaagaaaatacaggtatacagccgcattatatcagcgtgtttttaattagttttcgtggtaaatacgcagacggagaatcactcagggaagaagttggaaatgcggtgatcaatattaaaccatgcctgcacaaagcagacaccggcaagacgacttgggatggataagaaattcatacacaaagccctctgggtggataagtaatgcacaaaattacattgaataatccttttgtccatgatgaacatctcaaaatcgcaacgttaaactattaaataattgcgatgatttcataaaaaaatcaaaatatattaagcacagctaatcaattgcttcggtaattaattatccgttctttttttatcttcaggcggtatggagaaaagtaagaataacatcagaaagcgtccggcttgtttgccttttttgtattcacggaaaaaataaacaacaataacattacgtatataacagttaatttaattatctgttttgcagacaataaaaaagggattttcatcccttttttattattgttttgtgactgaaatatcactacaccagtttgctgatccagctgttgatatccccggccaggaagtttaccggcgggatttcgatcacactgtatgcgcccggctgctgacggcaggccgcccgcgccgcagacaccatgaactgagaggtcagtgccgggttattgatgcgcatgctgtattcaaacagctggttatgggttttacccgacacgcctttgtgcgtcatggagacaccgtgtcccacatctttcagggcgtccacactctctacctgacggacgtgcgtctcatcagaggcaaaataactgtcggctttcagcgcggcggtcacagtatcaatatcatgcccctgttcaatctcaacatagaccatacggcggtgaacaccggtacccagcgggattgtcatggagagtgcatccttcacaccgggaatcgctttggcggcaacactgtgccccatgctcatccccggcccgaagttagtgtatgtcagccccttcggtgccattgcctgcatcagcgtgcggataatggaatccgaacccggatcccagcctgcggagatgattgccgtacactcaccggcacgggcgattgggtcaaggtgctctttcagcgcaacaatttcactgtgaacatcaaaactgtccacagtattaattcccagcgcgaggatctcagaagcaaccgcacggatggcgcgggtcggcgagcacagcagtgccacatccaccttgcccagttcacggatatccgccaccaccggatacacagaatctgtatcagtggcagacgggttgcggcgcacaatccctgcaatctcaaaatcagcggcagcttccagcgcctcaatcgcatactgtccgatattgccgtaaccaacgacggcggctcgtatttttttcacggaattctctctgtcatcattgattagtcagataaggaaatcatacttatttatgaaaggaaacattgatttcttaattagttatgaaaaaaatgttttatttttcacctttcgctattctcagtaatattatcctggtagaatccggctccctgtatccgtcccggaacaaaaatcacactctttacagaaggtcgtcatgcatcagtctgatgtgacagagcgcgggctcttttccttaagctggccgatttttatcgacctgttattacacttttccaccttcctgattaatacctggatggtcagccatgtgtcgtcaaaatatctggcggcaatggcggtcggcaaccaggcgtttgacctgtttatcactattttcaactttatcagtgtcgggtgcagtgtggtgatcgcccagtatatcggggcgggcagacgggataaggccagtcaggcgattcatatttccatcgcgtttaacctgctgctgggattattgtccgccgggtttaccattattttcggctataaaattctggaactgatgaatacgccggaacatctgatggaagatgcctttaattatctgcatattctggggatctgtttaattccggaagcggtgaccatcattctggcggcctgtctgcgggtttacggcagagccaaacccgctatgtatgtcacgctgatcgccaacgtggtgactgtcgtcggtaactgcattgtgctgtacggcctgttcgggctgccgcagtacgggttggttggtgtcgcctggtccaccgtggccggacgtctgatcgcggtggcgctgctgtgcggcctgctcttttacggcctgcggattaaattcgtgccgcgcatgctgtttcactggtccaaaaatatgctgaagcagatcctgcatgtcggtctgccgtctgccggggaaaacctggtctggatgctgcattatatggtcgctatcgcctttatcgggctgatgggcgagaccgcactggcggcgcagaccatctacttccagttatcactgtttattatgttgttcgggataaccatcagtatcgggaatgaaatcctggtcgggcatctggtcggggcaaaacgttttgaggatgcctatcagcgcggcatgaaaagcctgaaaaccggctttttcagcaccatcccgattgtctttctgttctggctgttccgcgaccatctcgcttacgggctgagtgatgaccaggcggtgataaaactgctgctgccgctgttcctgctgtcagtcttcctcgaaccgggccggaccctgaatattgtgatggtgaacgccctgcgagccgccggtgacgcccgcttcccgctctgtaccgccctgttctttatgtggtgtgtggcactgccggtcggctatgtgctggggatcaaactggaaatgggaatactggggatctggattggttttctgtgtgatgagtggctgcgcgggctcgtcaatacctggcgctggcgctcgaaaaaatggcagtcaaaacggctggatattgagggctgatcctccggcaaaattcctgctgcggctgcgcagcgggaattacctggtaaaccagcggataacaccacaacaaagcaaataaaagaaaaaatacagagttatactctgataaacagccattaacgcagtttttcgtgactgctgtcacggggtctcatcacacttttttatttatgcataacataatgcatacaaatcatattcaatactatatttaaatcaaatagttagataagtatttttatctctttccatagccggacaatttcttgcttttttcccccctatccgccctattttttatttccgggagaaagtttttctccggattctgcaaatacccctgaattgtgaaaggatttttctgcttccctttcggtacactgagccgcataacggattcgcgtatttaaggctgaaaaatggcaacacatcacacccctgctcaatggaacaattttgtcgcggcactgcgtcagtcagtcaaaccggcgacaggctgcaccgagccgatttctctggcactggccgccgcaaaagcagcggcctgcctcagcgctgcaccgactcaaatccgctgctatgtttccccgaacctgatgaaaaacggcctcggcgtgaccgttccgggaaccggcatgaccggcctgccggtcgctgcggcactcggcgctatcggcggacagccggatgccggtctgaatgtcctgtgcggggtgactgcggacgatatcgccgccgggaaagcctttctcgcctccggtgcggtatctgtggaaatcaaagagccgtgcagccacgtgctttactctgaggccaccgtatacagcggtgatgatcaggccaccgtcactatctgcggcgatcatacccatgtgacggaaatcagccataacggcacgattatttatcaggatgatgcggtcacgcatcagggcggcagcgataacccgttcgcggatgcctgcgcccgtgatatttatgattttgccactcaggcaccggtttcgatgatcaattttatgcgtcaggccgctgatctgaatgatgccctggcccgcgaaggcatgtccaacccgtacgggttacaaatcggccgttcgctggagaaacagcgtgagcgcggattgctgtcaaaagacctgctgtccgacattatgatccgcacctcgtcagcctcggatgcccgtatgggcggcgcgcagctgcctgccatgagcaactccggttccggtaaccaggggattgccgctacccagccggtggtggtggtcgcggaatatttacaggcggatgaagagcagcttatccgcgccctgacattgtcccacctgatggcgatttatattcacagccagttcccgccgctttccgcgctgtgtgcggcaacgaccgcctcaatgggggcggcagccggtatcgcatggttatttgaaggaaaatatgagccggtggcgatggctatcagcagcatgatcggggatatcaccggtattatctgtgatggtgcttccaacagctgcgcgatgaaagtttccagcggtgtcagtgcagcctataaagcggtgctgatggcgatgaatcagcagtgtgtcggcggtaacgacggcatcgtctgtaccgatgtggataaatctattgctaacctctgcgcgctggccagcctgtctatgcagcacaccgacgtgcagattattgaaatcatggcaaacaaggcaaaatcagcctgatttttccgggtttggctttttaaggaagccccctttcctttaccggccgcaccggccggttttttcatgctttatttttacaacgacctgagcgggtgaatacccgctgttatcatgccgtcagcgtggcaaacgcattacggatttcctgctccggcagttgcatgccgataaaaatcagcacgctctgttttacatcatcctcacgccattcgcggtcaaaatctgcgctgtagagacgctgaacgccctggaataacaggcggcgcggctcatctttaatccagagtaaccctttgtaacgcagcatattatcggcatagctgagcagcagggtttccatcgcgcgggaaatggcactgatttctaccggtttatccatggtgatcaccagcgactgaatatcattctgctgtttcggcgcaaagcggaacagcggcttgctgattttcacattgtcatccagcataaaaccgccgacattaaacaacaggttcatgtcgatatcgccgttaatcaccttatacaccggcgctttggcattaatccgctgcaaacgggcgagcagcgcctcattatccggctcaacgtccgttttggtcagcagaatgcgatccgcgtagccaatctgcgcctgggcgatagtgaactgatccagctgctgctgtgcatgcaccgcatccaccagcgtgataatgccgtccagcacatagcgctcacacaatttttcattggagaagaaggtctgtgtgatcgggccgggatcagccataccggtgcattcaatcaccaggcggtcaaaatcgattttgccgctgtccaggttttcgcacaggtcgagcagcgcatcttccagctcactcgagcggctgcagcagatacacccgttgctcagggtttttatctgtgtggcgcggtcaccgataatttcatcatcgatcggcacctcgccgaattcattttcaatcacagcaattttctgcccgtgctcctcgtggagaatatggcgcagcagtgtggttttaccggcacccaggaaaccggtcaggatagtcacggagataggttgcataatcgggtccttcttacagacagacagcggaacaaaggctgtcagagtaacaaataacacggataataaaaaatatcccccgtacaatgtgactgacatcatacgggggatgagacttcagcgttactgcatgctgttatcagtgtgaggaggagactttaattccctcttccggaaccgggatatacggtgtttcgttatcagtacgttccgggtttttgctcgctttcatcgcagtacggatgccgtagaagatgatgctgtacaccacaaccaggaagataatactcagaccggcgttggtgtagttgttcaccacgatgtgctgcatattggcgacctgttcaggcgttaacgccacgccttccgcaatgcggcgtttgtactcattcgccagccagaagaagccttccagttgcgggttgtcactgaacagtttcagacccagcgcccatgtggtacaaatcagcagccataccgcaggaatagtggttacccagatatatttgctgcgcttcatcttaatcagaacaacggtggacagaaccagggcaacagccgccagcatctggttggagataccgaacagcggccacaggctcttaacgccgcccagcggatcgaccacgccctgatacagcagataaccccacagacccacgcaaccggcagtaccgatcacaccggcaatgaaggagtccgttttcttcaggaacggaacgaagttacccagcagatcctggagcataaagcggccggaacgggtacccgcatccagtgcagtcaggataaacagtgcttcaaacaggatcccgaagtgataccagaagcccatatccgccgcaggaatgattttatggaacacatgcgcgatacctaccgccagtgtcggtgcaccacccgcacggttcagaacagacggttcaccgatatctttggcggtctgtaaaatttgctccggcgaaataacaaagccccaggaactgaccgttgcggctgcctgtgcagtcacatctttcagctgtgccatgatcatcggtgcatctgcggtaccgaggttatgcagatccggcatggtgatacccagcgccgcaggcggggtgttcatcgcaaaatagagacccggttcgataatggaggctgcaaccagcgccataatcgccacaaaggattccatcagcatagcgccgtaaccgatataacgggcatcagtttcacaggccagcagtttcggtgtggtaccggaagcaatcagggcgtggaagccggaaaccgcaccacaggcaatagtaataaacaggaacgggaacaaagcacctttccagaccggaccggttccgtcaacgaactgtgtcatggccggcattttcagatccgggttgaggataacgatacccacagccagaccgacgataacaccgattttcaggaaggttgccagatagtcacgcggagccagaatcagccacaccggcagcagagcggaaacaaacgcatagccgatcagtgcataagtgatagtggtatctttaaaggtcagcgcagggccccagtacgggtcgtgtgcaatcacaccaccgaaccagatagccgccaccagcagcacaataccgatgacagacacttcaccgacacgtcccggccggagatagcgcatgtagatccccataaacagggcaatcggcacagtggatacgacggtgaacacaccccacggactttctgccagcgctttcaccacaatcagtgccagcacggcgaggatgatgatcataatcaggaagcagccgaagagcgcgatagtgcccggcacagttcccatctcttctttaacaatctcacccagagatgcaccattacggcgcgaggagataaacagcaccataaagtcctgtaccgcacctgccagcaccacaccggccagcagccagagtgtacccggcagataccccatctgcgcggcaagtaccggcccgactaacggacccgcaccggcgatcgcggcaaagtggtggccgaacagaacgttacggttagtcggaacatagttcagaccatcattattaatcaccgccggtgttgaccgggtcggatccagcttcataacctttgttgcgatatacaggctgtagtagcggtacgccaccagatagactgataccgatgcaacaatgatccataatgcactgacatgctcgccgcggcgtaatgcgacaacgccgagacagaaagcacctataatccccaggataaaccagggaatgtgcttaaataagcgattagagttcataacgcaccttaaatgtgactgtgataatcaaaaggatccgtatccgtacggaaaaagtgtttcagccgaataaaatagaaacttcctgcaagtgtgttttatgatagaaaaatcaaggcgggaaacggggattatcccgtaagcggttgtatagcagattaagcggtcactttttacagccgggcggttttatccgcctcccgggacggtaaaatttgtgatcgggttaacgttatgttttttaaattttttcatgctttttgttaattttttatgaaagcgtgcttttatccgcttttctccgtgatttatgacctgaaaccgacagaagacagtaaccgatatgactaaaaaacccggcacacctcccggcaacttccgtgcttatgctgataagcagacacaacgcaatatgctgtttcagcgggttctccgcctgctgaccttcagtgtggttttcctcgccggatttatgatttatcagacctggcagacacaacagaatgatgtctatgctgacgggcagataaccggttatctgcggacagaaatgcgcgatacccgttcggggcagcaactggtcggctggccggtggtgaaattcgtgacaacggataataaaatcgtgacctttacctcaacagatcagctgcagtgccagtcacagtgtgaaaacggtccggtgggtgtttattatcagaaggataatcctggcaaagcacagatagcggacttcggtgcccgctatggtgaaatgattgtctggggagtggtcgcctttattctgctggtgacctatattctgcacagctggcgcctgcggattctggcccgccgccgttacggtgcggcatcataaacggctgtccggcggtggtgtccggccgaacccggtgataaggccgtaaggtgaaatacggaaccagtgaccgccggtccaccaggagtgctcgccgtcggtttcctcttcacaccccacgccgacctcggcggtaccgctgacaaagccgtacgtgcagtcataaatagcggggatcaccacccgcccggtgacgctgtccgcataaccgattttattgccggagcggatacggtaacgcccgtcttccggttcatccggcgcactgtcgaaatagtacggctgatacggctcctgcagattacggtcgacgaaatggctgccgaaagtgtctttatcccggtacagacagagctcaaagggattatccggcctgaagcagttatccgctactgacggttcatccgccctcgcccgcacccattcacgggctttttctgcctgcacatccgtaccggcaaatgcggtcagcggcagcaacatcacaaatacgattcccggtattctgcatctcatcggttattcctctgcctgaccacggtctgtgatgccttcctctttatatatacgggaaggccatcaccgatattaccccggtcagccggtgacgactactgatgccgccgcctgttttgcagtatttaccgcttcctgaacagaaggtgccagcgccagggcaacgcccatgcgccgggagccgtcaatctccggtttggcaaacagacgcagttgcacagtcccggtcagggcgtgctccagcccgctgtaacggacatcatcgctgcgcagtgacggcaggatcaccgctgaggcagccggacggtactgaactatctctccggccggtaatccgagaaacgcccgcacatgcagggcaaattcagagatattctgtgaaatcagggtgaccagcccggtatcatgaggacgcggggaaacttcattaaaaataatatcctcaccacggacaaacagctcaacaccgaacagaccatagccgcccagcccgttaacaatagtctccgccacctgttgtgcccgtgccagaacagcatccggcatggcctgcggctgccaggattcacggtaatccccgcgctcctgacggtgcccgaccggcgcacagaaatgcacaccatctgccgcacggacagtcagcagcgtgatttcataatcgaaatcaatcatccgctcgacaatcacccgcccttttccggcgcgtcctgcttcctgagaagccagccaggcatcatgcaatgtgctttcatcgcggataatgctctgccctttacccgatgaactcatcaccggcttgataatgcagggaaatccaatctcaccggcggcacggataaaagacgcctcgtcatccgcaaagcggtattctgatgtcatcagccccagttcttctgcggccaggcggcggatcccctcacggttcatggtcagttttaccgcattggcacagggcacgacatgaaagccctcctgctccagccggtataatgtatctgtcgcaatcgcttcaatttccggcacaatatggtcaggctgttctttccggatcacagcttccagctccgcgccgtccagcatgttgatcacatagcggcggtgcgcgatatgcatggccggcgcgttgtcataacgatcaacagcaatcacttcaataccgagccgctggcactcaatcgccacttctttgcctaattcacctgcgcccagcagcatcacttttgtggcacccgggcgtaatgccgtacctaatgttgtcatcactgtcacctgttcagaaataccggaaaatttgcgcgccattatatacgcaatcgtttgctttagtcacgaaataagcaaatcaccggcggtcacagtgctcagcggggtttgatacccagaccggcttttgctgtatttttccagtgatgacggataagagacaggatgcagaacagcaatcccagccagatcaatgagaaactgacgcctttgacagcatcaaaatgctcattaaagaggaacaccgccagcaggaactgaatggtcggttcgagatactgtgccagcccgattgtggtcagtgtggtggaacgcaccgcagccgtgaaaaacagcagcggcagcagcgtgacaggcgcggtcagtataaaacagatgcgggtaaaggtatctgcggtgctgaatgtacccgctccgctgttttcaagccagaaatacaacacaatagccaccggcagcagccagaggctttcaatcagcagtgaggtcgtcagatcataacggataaatttgcggatgaagccgtacagtgcaaacgcagagcccatcatcagcgccagtttcggcaggctgccgtactgataaagctgataacccaccccggcacagacgaaaatcagcgcggttttctctgccggtttcaggcgttcatgcaggaagatgacacccagtaaaatagaaaacaagggggtgatgaaatatcccatgctggcttccagcaccaaatcatgggtcattgaataggtaaaggtgcaccaggatattgccatcacactggtactgagcagacaaagcagcagcgagcgtttatccgcccataccgcttttacccgggtacggttttttaaaaagaaacggacaaataataacagcggaattgaccagaggacgcgctgggataataactccagcggttgcaccccaggcagcaggcggtaaaaaagcggtgtgatcccccagagaaaataagaaaaaatcgccagcatcgcgccggatcgtaaaaacatggttcagccaatcctgtttatcattatgttatgactatcatacccccctgcattaaaaatcccatgcgcctgctcaatttatttcccgtcgccggtctctcccgtgcacatcatattatgttcactaaaactacgctgtttactacgcagatataactatgaaatatcaatttcgcttgattttcacattgataacgttaacataataagtatcattaacaaatcatttttgggtataattcctaatatttgatgttaacgttaactttgagtagttatagctagatagatcccctgattttttatactctggaaaccacagacattcgtaatacattgatgataaaagacaaataatcatttgatgttcattgccgcgataaacagagtaacacgtcggacatttccctccggagattgaaaaatctttcgtgcggtagctttgtctctgaaaaatatcgtcacctttttttaattaactattttaacgttaacattgaaagataagtaataataattaccatcacgtcgccttaaattacagaaacaacattaaaatacaatattgaaagttttgtgtttagccaaagcgaaatttacgcttaatgttgcactcaaaacgacagataaatccgtaattacaaaaataacgttgcactgattttctatccggcgaccttcccttggttaattaaaaaaattaaccaaacgtgaacggataaaaatcagaaaaaagagaaaggattgtgtgactgccggggatcagagtgactctctgctgagcatccggcaagggatataagtccgccctgacgaaacccgttcctcaataagatgcagtgccgctgtttcacccagcaggcgatacggagagcggatagtggtcagcgggggataaaaaagttctccggtaccggtcatattttcacagccgagaataccggcctgctccggaacagaaataccgcgggttaataaaacctgatacacaacaaaggctatctggtcattaccgcagataatacagtcaaataacggtgaattaccgtcaatgtattgatctatcagtgtcacaacgtcccggtaataaatatcagataatgtgatgttgtactgattcagtttatcggcagacaatcccgcattcagccacgcattctgaaccgcatcacggcgcagaccggatgaaaggcattccgccggcggccagatacagagcggacggcggtaaccccgctgaataagatattctgtcgcatcatactgagcatggtaatcatccggaatataacacggtaacgctgtatttccgggatcatagcagttcgctaataccaggtttctgtcgcggagtaactcaggaatgtttatctcacgcaattctgcaccggtaataataataccgtcagggcggcgggataaaatctggcgggcagccggaaccgggtcattcccggatgaaatattaacaacaaaatggtcccagccatattttccggcgcactgctcaatagccagcagtatttcaacagaaaacggggccgaggcggtatcaattgctaatacccccatacacgacagatttgtatttttacctctgattttccgggctgataaatccggaacataattcagaacatcaatagcatgctgaacctgtctcaacgtctcaggcttcagcaattcaggattatttattgcccttgaaacagtcatcagtgagactgatgccaggcgggcaacatctttcagtgatgccatattattatcagtagaaaataagtgtttgttctgtcgcgtgaaaaagaaaaaaatgtgagctgacatttataacatattgtgtctgtaaccccaagagtaaatgtaagtgtttatttcataaaaaagccccttaacccataaattaaacgaattttaaactactgcaacacattgttttataaaaaataaaaataaaaaacatcataaattattatgattttattaaaaaacacacaccgattccgaaatgagatttccttatccatttaaacattttctcgacgttatcttatctacaatacataaaatttgcgtagataaacctaagtaattatgcccttatttttatccgttaatattggtttgttttgtgtcctattttaattgaggagtaacttatggatgccgttattcatttaatcaactgtgctgatttaccaagcaacaatatcaatttcatgcttgatgatatgaattgtgaagtaaaatcttattcatctgagcaggcttttctgaaatattatgttaatacgccaaaagagcatgcccgtgaatgtattattctggaagtgggagaatcatctgctgaagcattctatcttatcgatgaactcaaacgcctgaaaagcattattcctgtgattgttatcaccgcttatccgtcttttgagacctgccgccgtgcatttaaagcaggtattctggaattcttcaagaaaccgattaattcagaactgttagttaatgcgattcatgatgcatttaatcaatatgaaaagagcctcaataaatatcatacgtatcagaggcttaaagataagttcagtaaattgtctgcccgtgaaaaagaagtcatggatatgattctggaaggaaataccagtaaagaagctgcacaaaaattatcattatcgccgcgtactgttgaagtacaccgttctaatatgtataccaagctgcgtattaagtcattaccacagctggtgcaggaatatgatttctataaaaactattcagattcaatctgagcatttccgtttttataataaactttatattccgcttttgtagttaataaatataccgatgattttacctgcttcttcttgcttatttagctgcttctgatgcttcactgttaatacagattgtcttttttatcatattccggattgcgccagtgttaccactggtgacaaattgtaatgtaatggtaatacgccagggtcttactctgatattaacgacacataccggcagtcatatattccggaaaaacagacataatgagatctgacaccctgtaatacagatataaaacttcagtaatagtatttaatacccggttactcattttaatattttgttacaaatggaccgaaatgcattttactccttatatgagtgaacaggagttgtgtgctgcctgaaaatccccctctatttataccactcttcccctgcgtgttttcatgctgatacttccaatcagcaagaatgacatgtcccgctgttattccctgaaattcgctgtattcctgtaatatacaccataaaaaaagcatccgttacaggatgctttcagtattcacataatcgccggattattctattttcagcacgttcagtttgatcatagacattgagttcggtggtatctgcccttcaataccggcaacaccataaccgccttccggtttgatatacacatcaaccgcaccgcctgcgccggcaagtgaaacgaatttagccaggtcacccggtaactcattgaacggaataaccgccggtgcatttgccggatacgacacggtgactttaccgtcagttagttcctcatgcatcgcaaatgtgactgtttttcctttcagcgccttatatttctgtccctgtttggtgatacggtaataaacgtccggcgtcattttggaataattctggcgctccaggcgggcgatcagctcctggtttttccgtttattcagctcaccaacctgctgaaaagtataagccgtcacggctttatttttttcttctgctttcgcaatttgcgtattcagcgtggtattttcagtccgctgagcactgacaaccgccttttgcttatccatttctttctgcaatgcggtatattttgccgagagatcggcattttctttcagcttagccgccgctttggcgagttctgcatctttatctgccagctgctttttctggttatcaagctgagtattcagcttaattaattccgcatcagattttgccagtgcttcaatctgctgtgttttctcttttaaggctttatccagctgagcagcccgctgctgttctgccgctaattttttattcagtccggcattatccgcctgaacagtactgctctctttatccgcaccagatacttttgccgacagcagttgcttatccgccgtcagctgcgcaattttttgttccagtgtggctttatccacggtcagcgcagctacttcttttttcagattatcgctctggcgggtattatccgcctcacggctctgtaactgagctgtcagcttaagtttatcggcctcacgctgctgtaattctttttccagtgtctgcaactgagccgccatttttgcgttatcggtatttttggcgttcagttgtgtaatctgtttttccagcgcggttttatccgctgcccgggtgctgagctcttttttcagcttgtcactctgtgctgccgcgtctttactctgaccggccagctgttccgcaagcttctgcttttctgtttcggtatttttcagcttcagctcagtatcggtcaggtcgcgggtgactttcgccagatcggtatttttgttgctcagaagcgctgcatttttctctgcctgtgctttat

SEQ ID NO: 40 - DNA, 37815 bp, unknown
  Altogen 322075 strain
ataacaataaaaatatcattccggaaaattatacaaaccggccagatttttcattctgccggtcacaacatgaatggataaaaacacaatatcctgctgttttgtttttattcttttgcaataaaaaacgggtttgccccttccggtagcaaacccactgttaacgcgctgataccattacggacgaacagctgtcacttcgatctctacacgccatgccgggtttgctaatttagaaacctgaacagtggtacgcgccggtaatgtgttaccggaatctttgtcgttgtaatatttggagtaaccggccataaagcccgcgaaatccatattaccgttagtctcttcgccgccgaccaggaatacctgcattttcaccacgtctttcatttccagacctaagccagccaggtgcgccttgatctgttccatgatattgatggtctgtgcttcggtattgccgtatgacgccagaacaccttccggtgcgtctttggaaattttggtcggtactttgccgctgaggaaaataatatttttgctgctgctgatttccacagattcagagataggcataccgttcagtttatgatgaacaacaccttctgacgcgtgagccgcgccccagaccagcggaagagctaacagtaaacttttgtaacgcatattaagcctcttaatagtatcaacgtaagtaatcagaaaattaactaaaacgtgaaagactaaacggagccgggtcaataaccggttttttaccggtcacgatatccgcagtgatttcaccggatgccggaccttctgtcataccccagacagtcgcggtgttgatcaccagacccggatactctttcacttcagaaataatcggcagttcgtcgtaggttggtgcgacaaccgcgccccagcgttcaacgactttcgattgttcaaatacagggaattccgctttcatgcgggcaaataccgcatccaggtgttcggtattctgtgtggcggttgcgatgcggtaagtctcgaacggcgtgacttcatccagattccaggatgtcgccattttgaaggagttaaacagatcttcaccgatggagaattccagcggcagctcaccgccgcccagcagatgcaggaatttcggccccagcaggaagctgtctttcaccacagagctggtgaagatacgcggtgccacggcatatgtgccgtctgcctgctcgcggaaatgaatgccgctcggcagatgcacgttaccgcgtggtgcgcccggaacgccggaaacacgctgttgtgacagatagacgttcagtgtcggaatatcaatgcccagattacccataaacaggcgtgaccagataccgccggtcaggaccacatgagaggttttgattgcacccttctctgtgaccacatcagagactttaccaccggcagtttcgataccacggaccgcacagttagtgtagattttaacacccagagacttggcatactgcgccagaaccggtacaccggtttccgggtcaacactgcctgaatcttcttcaaaaccggcgatcggccagtctgttttggcatcaaccaggcgttttttcagttcgtcgccctgaatgaaacgggtgttgagcggtgcttcgaaatcagcggcccactctttggcactctcaacccaggcctgtgattttgcgagatcttccgcgcttgacggtacctcaacacggccctgggtacgatagctggtatccgccccgattttttcattcataccgcgccataacattttgccgtaatggtgcagcgggaaaatttcttttgatgttttgtagctgatgatctggctgtaagcacgtccggactgctcaccggcgatttcacctttttccaggacggtgacgctcatgcctctttccgccaggttaatcgctgtcatgatccccatcatgccgccgccgataatgactgcatcggactctttcggtaatgcaccttcggtgccgtcaacatgttttgcgcgtgaagtcgattccacaaatttgccgtcgcggcgaaccataggaactaatactgaagcaccacctgccagtacgccggcagcaccaacccctaaaattaactttctgcgtgagattttcatctaaagcctcatcattatctgtaatatttgtgtggcatttttttaattaagtagcacactaattataacaactatcattataatgttaatgaatatagtgtgatgttaataataacgagacttaaggtaagctttatcaggaattgccgatataaagtatcggatttgacgaggtgatgaacaggattcaggccggatcgtctgcggtaaaaccagcgggaaatatcataaacccttgttattatagtggataaggctaaatagtgatcttttttaagaagttgttacatcagggataaaaataaaacgccggatgccacagcagcaccctgcgttttataaagatattaacaatgagggaaagatcaggcggatggcgtacgttttctgagctgcagaaaccatttatccagttcattggcaaacaactggcgatcacgctggttcagtgccgccggaccgccggtctggatgccggaagcccgcatagtgtccataaaatcacgcatggtcaggcgctcacggatagtcgccggggtataacgttcgccgcgcgggttcagtgccaccgcgcccttctccagcacttcagcggccagcggaatatcagcggtgacgacaagatcatctttctgcacacggcggacaatttcattatcggccacatcaaatccggcagagacttgcaatgtttttaaaaacggtgacggcggtaccaccagccgctgattggccacaaaggtgacttctgttttttcccgatccgctgcccggtaaaggatctctttgataactttcggacaggcgtccgcatccacccaaatcgccactgtttactttcctctgtactgcaaaatttaatccgcgatcataacgcattaacgctttctgataacctgaaaaagtgccgccagaacaacaaaaccggcaaaaaaggagacagaaaatgacaattcataaaagacaaaacgatttatatgaacaccggttgctgtctgcgccagacggtacgccagcggcgccgtacacagtgccgccagaactgccagcgcaatcagacggataaaccggataagattgccgcgcttctctgcttccggcagtgcccgctgatactgtgcaaatttcagacagagataaccggcaccaagcagtgatcccagatgctgcaacactttatataccgcaatctcctgcccgtccgtcatgccttgcaacaatggtacctgtaaaacggacagcgcccgcaccatcgtgccggtttcatgggtaaatgcatcccagataatatgtgtggccgccccgataaacagagacaacaaaatgacactgtttttccgcaaagaacgggtcagcgggtcagtcaccgggaacggtaacacggttttcagcggtacggataaccagtgaaaaatcagcagaaccgccagacacaccggcagtccggtataaaaccagccggtgaaatgatgcgcttcatccgcggcgcggtacatcccggaagagtacagcaaatccggcgatacactgcccgtaatgagcgcaggcagattcagccaccgcccgtaacgggattgtttcaggggaaaaacaatcgccggatgtgcaaaagtccatggcatatatacttatcctgctccggaaaaccggaaataaattcatttttatgctaataaatagccggtcacaacaattaataacacgccggactccggacaataacctgtaaaggcaaaaaaatgaaaaagtatcttaccgggatgatcgtaaccgggctgttatcggccccggcgctggctcaggagtttacctgccagctggaaaataataagtatgtcagtgtggtggtggaaaaaggtaaaacgccggcataccgctacgggacgctggcaaagccggaaattaccctgccggtaaaaggcagtgcgaaaaatggtgtttatgtcggacaaaccatgtttagcggcggtggttcggcgtatatccgctttgaaaacggcccgtttaactatgtggtatacagcggaatgggccgcggctgggaatttaccggccttgcggtctataaaggcgataaagtcatcaataaaaaggtctgtaaaaccgatttggggatctatgatgttctgaattacggtctgccggaagatggatccggtgaaatctatgccatggatccgaactcacaataatatgtactgcggtggcctgccgggtcaccgccctttttttatacatctgtgcctcgccgcccatctgtggcataatgcccgccgtttattttctcctttaacttatgagtattcgtcttgttaatcagcaacaatattacgatgcagttcggcgccaagccgctgtttgaaaatatctctgtcaaattcggcggtggtaaccgctatggcctgatcggcgcaaacggcagcggtaaatccacgtttatgaaaattctcggcggtgatctggcaccgagcagcggcaacgtgtttctcgatccgaacgaacgtctgggtaaactgaaacaggatcagttcgcctatgaagaattttctgtgctcgatacagtcattatgggtcacaccgaactgtgggaagtcaaacaggagcgtgaccgcatctacagtctgccggacatgagcgaagaagacggtatgcgtgttgcggatctcgaagtgcagtttgctgaaatggacggctacaccgtggaatcccgcgccggtgaattactgctgggtgtggggatcccgctggaacagcataacggcccgatgagtgaaatcgcgcccggctggaaactgcgtgtgctgctggcacaggcgctgtttgcggacccggatattctgctgctcgacgaaccgacgaacaacctggatatcgacaccatccgctggctggagcagacgctgaatgcgcgcaacagcaccatgatcatcatttcccatgaccgtcactttctgaatatggtgtgcacgcacatggccgatctggactacggcagcctgaatgtgcatccgggcaactacgatgaatatatgtttgccgctactcaggcgcgcgaacgactgttagcggataacgcgaagaaaaaagcacaaatcagtgaattgcagtcatttgtcagccgtttcagcgcaaatgcctccaagtcccgtcaggcgacttcccgcgccaaacagattgaaaaaattcagctgaccgagattaaagcgtccagccgtcagaacccgtttatccgtttcgagcaggataagaaattattccgtaatgcgctggaagtggaaaacctgtccaaaagttatgacgataacgccccgctgttcaaaaacgtcaatatgatgatggaagtgggtgaaaaagtcgcggttctgggtatgaacggtgtgggtaaatccaccttcctgaaaaccctggtcggtgaactgacaccggataccggtcgttataagtggtctgaaaacgccaatatcggttactacgcgcaggaccacgccaccgattttgaagttgatatgacggttttcgactggatgagcctgtggatgcaaccgggtgatgatgagcagtccgtccgcagtgtgctgggccgcctgctgttctcccaggatgacattaaaaaatccgtacaggtgttatccgggggtgaaaaaggccggatgttatttggtaagttaatgatgactaaaccaaacattctgattatggatgagccgaccaaccacctcgacatggaatccattgaatccctgaatatggcgctggaattatatcagggaacattagtgtttgtttcccatgaccgtgagtttgtcagctccctggcgacccgcatcatcgaaatcacaccggagaaagtcacagactttaccggcagttacgatgagtacctgcgcagccgcggtattgaatcagaaaacaactgatccccgttctgccaataagaaaagccccgtttcagagccatgaaacggggctttttgttttcgtcagacccggcgggggcggttgccggcatatctgacatttttcagaaaccagttcccgcatacctctgtcctgtaccggaaactgataggaagaatatctgtattcgggtagaatgtgcttgctaatcagaccctgatttaccttatttgagggagaaaatcatcaatggacagctttgacaggaagattctttctgaattacaactcgacgggcgattaactgtcactgagctggcagatcgcgtgggtctgagtttatccccctgccaccggcggctgaaagcactggagcaatccggggctatctgtgattaccgcgcacagcttgatccgcgtgtattggggctgaatttctccgcactggtgtttgtcactatgaaagacggcaaccaggaaagtatgagcaagtttgagacagcggtggcggatattccgcaaattatcgaagccaaacggctgtttggcgatccggactatatgctgaccgtcgtggtgaaagatatcgatgcctttcagaaattatatgacagccgcctggccgccatgccgggggttcagcgcctgacctccaccctggtgatgaaagatgtaatcccggcgcgggaactgcccttgctgtaataaaaaagccggcaatatctgccggcaagcaacacagtactgaattttttatgccgggctggctaatttcatcatcaccagcccggagataattaatacccctgcgataatccgcatcatgtttgccggttcacccagcaccacaatcccgacgataaaggcaccgatagcgccaatcccggtccagatggtgtaagccgtccccagcggcagtgcccgcatggccattgccagcagcccgaagcttatcagcatggcaataatggtgatcactgacggccccactttggtgaaaccctctgattgtttcatggtaaatgcccagacgacttcaaataatccggcagtaattaataaaatccacggcatggtacatcctcactgatttctggttgcaggtgatacgtttataagttacctttggtatagttatatgttacctttggtaacttgtaaatacctttccgatcttttttcgatcttttctgtcagctgaccgcgaccgggaactctgtgatacactttccggcagacagaacgactttaatatcaatgaggaggcagatttgtccggacgtttacagcgcgacgagcgccagatacagctgctccatgtcgccaacagcattatcctggcggaaggcaccgatgccctgaccctcattacccttgcggaaaaggcgggcgtgaccaagccggtgacctacaaacatttcggcaaccgcaagtccctgctgcacgcgctgtttaaatacagtgatgatgttctgactgaacggatgaataccgggagggaacagccgatagcggatctcgatcaggctgtttctgtctttatcacgacctactttgatgtgatggcagatgacggtgaagctttcaatgccaccgtagctgcactgaaagcctatcctgaatatgcggggatcagccgcgaagtgcaggattttttctgccagatcctgcaacgtgcactgcagcgctggctgccggagaatttccggatcccggaatggacttctgtgatgattttcggtgcaaccgagtcactatgcctgatgatgtttgctgacccggcactgaaagcaaaagtcagtgaagaagctatctggctggtcaaaaccctgctggccgaccagcttaagcggttcaccggccgctgatgaccagttcttcctcttctgacggataactgaagtgcgcggtgatcaggtcaaattgctccgctgaggtggtaaacgggttttccccgctcagattccttgcggccagccgccgtttacactcttcatcactcacatccagcacatgacagcaataactgcatccggcctgctctgccagccctttcagccaccggcgttgtaccggggtattcgccggaaaatccagaaccagtgtcactccctgtcgcaataatgtcaccagatgcagcttcagggcggatttcagcagacgacttttttcaatataatcagccagctctgtgatttgtcccggatacagcgccgccagccaggtatcttcagacaacagaacggcctgttgtccgcggactaattgttgtgccagtgtcgatttccctgaggcgattttgccgcagaggaagtgtagtgtggcggaagattgtgtttctgacatgattgctccctgtctgttatgccgctgagagagcaataaagaacccgctcaggcggcgggttctgaatacagcacatcccccgctatggtgcggagataataatcatgccggatgcgctgtatgaattcatgatattaacctttttgaaataatcatcatttcagtgattctgttttagcagagtctgccgcggatgtcaggcagtttttttcggccgtttaatacttatcaccgccagggccagcacaatcatcacgatccctgccgtttctgtgctgcccggttcctcacccagcagccaccatgagaacagcacaccgcagaccggcaccgccagtgtgctcagactggcaatccccgccggtaattttctcagcacaaacagccataaactccaggcaacggcggtcgccagaatagcgctgtaactcagtgcccagaagacatacggctgccagtcaatcgtgcgctgcggcaccaaaaatgccaccacagtcataataattgcggcatacaccatctgccaggtggtgagagagagtaaatccacctgcggatagcggctggagggttttttcgccacaatcgcactcgcaccccagctgataccggatgccacggccagaaaggcacttttcatagaggcgaaatcgagtgtccagggctggatcacacacaataacccggcaccggcaactgaaatagccgcatactggaggcggcgcatccgctcaccgagcaatactgctgccataatcaccacccagaacggcatggtataactgaggatcgccaccttccccgcaccgccgctgaccagcgcccattgtgccagcccgaccataccgcaggtctgaaggacggctattcccagagtgtagcggaatggcgtaaagcggattttccgccccatcgcgcgttcgcggatatacagcaccagtaataacataatggcactgaatacacagcgcatcgccgtaaagtcaaacgcaccaatatagtgcgtgacctgcttcatagcgatccagctgtaactccagatcagtgttaaaatgaccaggccggtaatggcgatggcattgtctttttcccgtaaagccataatatcctgtgaccacttcacggcagtacccgtctgtaccccgcgtgcggctcctgtttttatagtaccataaccggaataatatgccggatgcccgcagacgggccgacctcatgcaatctgcatttctgccagtttacacccggtttgaaagaagggaaaagatcaatacacaacagacggtgtttattgttctgcggcaaccaacatccacctgccgctgggattgcattcctgaattacataaagtttactgatggttacccatcgtatttcttatatttccaatgcgctcattaatatcagaaggaagaacgccacagcctcactcaagcatcacaatactatcaattttccactgtccgttttgctgaatcagttttacccggaatgaccgcaacggctccggtgctttacccagtgtaatgcgcacagtagccgtatctgcggtttgtgattcagtatgcgctgcctgctctgtcatccacgaatcagggtaatcctgtgacttggtgtaataattgacatcattttccacccagtgttctccccacagacagatataactatgtgcggtttctttgcaggggcgcggctggtcgcagaatgcctgatcagtgcccgggccatcaaaattacaactgagggattcactgatactttcctgcaacgccgggctgacatacaaatcctggctttttgcataaccatcagaaggcggatcctgcagattgagacggtagaaatccaataccacattttccggtgataattgtgcggcaaccgctgataacggtaatagcagagacaaaaccagcgggaggtattttattgttttcatgattgtttttcttcacataattttcagtatacctgccgccgccgcaacctggctgcgaatagcaacggggacatgattcaggttgattttcatcagcaaatactattcatagagagcatacaactgttctgccaacggtaatggtaagccgtcatcataagcctcatcatccaaatcaacatacacatcaccgggtgcggcgatcagcatgatgtctggtaccggccgtctgaccggcagatccgggtagtcatccggccgtccgccttctgactgcatcgggtcaaaccagataccatgatcggcataaaaccccgcagaatagcgggtttcaattaaccggatcaatgtcagggtttgccgtgaatagtccggtacatcatcatcatggccatactgcacataccaggccgcgcccaacgaccagtacatcagcagtgcggatgcccgatccagttgcggatccgccgccagttcgttcagtgcatcataattactgtcataattagaccgggcgataaacaaatgccgctgttccggcgttgcgtttgtcagaaaatcacggattaactgtgcttctttctgttctttttcttcgtccgtcatgccattctccccgacagcgccagatgctgtaacagcataatcgttttgccatcatttatttcaccgcttttgatcgctgcgagagcctgcgggaacggcatttccagcacttccacatcttcgccctcttccggcaggccgccaccggccgtctgccggttattgtcttcgtattcggcaataaaaaaataaagtttctcggtgacagatcccgggctcataaaggcttcaaagactttttcaacatcggtaatgcgaaaaccggtctcttcctctgcttccgctttgatgcgggataccggatcctgctcttccagcagaccggcggccgcttcaatcagaaagccgtcatggccgttgacatacaccggcaaacggaactgacggatcagaatgacgctgtttttctggcggttatacaacagtataaccgcgccgttaccacggtcatagacttcccgctccagacgctggcgggtgccgtcgcggcgcagataatcaacgacatattttttgaggatataccagttatcggaaagcgtgatggtatcaataatacggactgtgctctgttcggaagtcatagttcaccggatgtcagcgaaattgcgggtttgcagaacactctaatcgctttatccgtctccggcaatggcaaaaccaccagcattatttgcaggcatattaatgctgacgatataatctgccgcagataatccacaaacaaggcgggttgcatgagtgacactcaggcactgagttacagcgaattacatacaatatctgatgcagatatcgcacaaattaatgaattaattatcactacctgggattaccgcagctggatcccgaaagagaaagttctgcctatggcggaatttttgctggatgatgtcattctgacctcatcacggatttttgtggtgcgggatggtgataccatcgccggtattatggcggtcacggcatctgccgatttgcgggagaaagtccgcgccaaaacccgtcagtattctgccctgaaaaatattatcgcccgtgacccgcaggaagaaaccctgtttgatatgtatctgaatacgctgattatcaacggaaatctgctggcttcctgtgacgggaatttcgatgcctctctgaatttgtttatgatagatgcccgcttccgcggacacggtatcggtaaccggctctggcagctggcgatggattatctgcgggaaaaacaatccgcccgttatttcctctggacagacagtgattccgatttcggtttttatgaacacaaaggattacagcgtatcgccgcacaagcctatgactggggcggccatgacgtgactgaaacctattatgtttatgccggggaactccctgctctgtcctgatgcatccagctgtcccacggcggatcaagcggcagcttatccgccagaaaatcaataaaggtgcggattttcggggcatgggtgtgcgccgggctgtaaagtgcatagagcgcgaacggcgtggttttcggattgtaatccagtaataccggcaataattcaccgttatcaatataatttcccagcatataggtcggcagacagacaatcccctgatgacagcgcgccgcctccagtaatcccaggctgctgttgacctcaatcatattgttgatcgccagcggataagctacaccgtctttatcattcatccgccaggtgtccggaatattaggattaattaaacaattgtgccgggcaatatccgccggtgactgcgggatcccgttttgttcaaaataatgacggctgccgcaatagatccaatttatattgcatagtttccgtaatgcaaaattttccgggggatgactggtaatacgcagtgcaatatcaaagtcagtttcatttaaattaattaatgcatcgttcagatcaacggataagctgacctgcggatttatttcccggtattcgctgtaaagccgcattaaatggcagacgccgaaggcaattgaacaggttatttttagctgtccctgtgcatgctgataaaaactcgccgtattcactaatgagtcatcgagatctgtcagtaactgttgcgccctctgcaataaataacgtccggcttcagtcaggataaaattgcgggtggttcgtttcagcagaaccacaccgagctgctcttccagctgctgtaagccacggctgacagacgacggtgttacattgagttttcgtgccgcaccgctgaaactgttgcactccacaattttgataaacagctccagatggcgaaaaatcgcgtagctgtcaatttttgctttaaacgcaaaagtgtttttatttattagcatagtcgtaccctgttcagcctgcgtgttaccccttactataacaatggctttataacactgtatccatacaacataaatatattcacgttgttcctgactttttaaataattaaatctataacgttgaggaattgactatgcaagacagcattcagacaggtgcaaatgcaaatagtgatttaaaaaagataccctttaccaaatatgatgccgggtgggttgtattatgtatcgggatggcgatcggttccgggattgtttttatgccggttcagattggtattaaaggcatctgggtatttattgccgccacattattgtcatatccggcgatttactggctgcagaatttatatctgaggacattatcagaatcggaagaatgtgaagactatgccagcgttatcacgcagtatctggggaaaaactggggggttgcccttggtatcgcctatttcctgatgctgctgcacggcatgttttcctattcactcgccgtgacctttgacagtgcctcctacatcaaaacattcggtttaacggaaggactgttatccgattcggtgtggtacgggctgattatcctgacagttctggtggctatcgccgcacagggggagcgcctgttatttaaagtctccggcccgatggtaatagtgaaattcgggattatcgtattactcgggattgtaatggtgccttactggaactttgccaatatcagcgcgttcccggacttcctgccgttcctgcgggatgtgtttctgacactgccgtttaccctgttctccattctgttcgtgcagattttaagcccgatgaacattgcctaccgcagactggaaaaagacaagcgtatcgcgacttaccgtgcggtgcgggcaaaccgggtggcgtatattattctggccgttgctgttctgttctttgccttctcgtttacgttctcgataagccacgaccaggccgtctccgcgtttgagcagaatatctcagcgctggcgattgccgcacaggtaattccggggtcggttgttaaagtgatgaccgcaatgctgaatattttcgcgattctgaccgcgtttctcggcatttatctgggttttcaggaagcgattaaaggtattgtggtgaatatcctgacccgttttatgccgcaggagcgtattaatcagaccgtgctgcattacggtgtgtgtatcggggtgatcctgtccctgtggttctgggtctccacccgcttctcgattctgttctttatgcagctcggcgggccgttattcggcgtggtttcctgcctgatcccgtgctatctggtttaccgcgtgccggtcttacataaattcaaaggtgcaacagtctggtttattatcttcttcggcgtgctgttgtgtctctctccgttctttaagtttttcgaataacgctgtaaatgaataatgacgtattacgcgtgaggatgttatgactaaaaaaaccgtttcagattttcatattgatacacagataacgcagctgggacgcgacccggcgtcacagtccggttttgttaatgccccggtttaccggggatctaccgtggttttcccgactatggatgccctgctcaataaccgggctgagtttaactacggcactgcgggcacgccgaccattaaaaacctcgagcaatcctggagcgcccttgcgggcgccgaaggaactgtgctgtcaccgtccgggctgggcgccattgtactggcgctgctgaccacactgaaaagcggcgataacctgctgatgccggacagtgtttatcgtccgacccgcaatttctgccgtggtctgctggaaaaaatggggatcaccatcacctattacgacccgatgatcggcggtgatattgagtctctgataaaaagcaacaccagcacgattttcctggagtctccggggtctcagagctttgaggttcaggatgttccggccattacggcggtagcgaaaaaatacaatatcgcgacgattattgacaacacctgggcaaccccgctgtttttcagggcgcatgatatgggctgtgacctctcccttgaggccggtaccaaatacctgggcggccattccgatctgctgatggggattgtctccgccaacgcggaatggtggccgaaactgcgggaaacctatgatctgatggcaatgctgccgggggcggaagattgcttcctggcactgcgcgggttgcgtaccctgtcaatccgcctgaaagaagcgcagtcacgggcgctggatattgcacactggctgaaagcgcgtccggaagtgatccgcgtgctgcatccggcctttgaggattgcccgggacacgagatctggaaacgtgacttcaccggctcttccggcctgttctcagtggtcctggatccgaaatttacacaggatgacgtcggcaggttactggacggcctctccatcttcggcatggggtattcctggggtggttttgaaagcctgatcacgccgtttgattgcgcggaataccgcaccgtcacacagtggaatccgggcggacggacactgcgcctgcaaatcgggctggaagatgttgatgacctgaaacgtgatttggcggatggatttgcgcgtatggcgcattgatattccgccggaaaaaaggaatagtaaggtataccgaaaaacctgcattttgcaggttttttgttgaacggaatcaacaaatgcccttaaaccgaacttaccttaccgatattgccggacttatcatctatatgacccttgcctggctcagcctgaattttttcagtatcagtgagtatgactggatgctggatgacggctcggtggcagacgtctgcggattgccttatgaccccgatcgcggcatctttgcgccctgcgggttactgatggttatccccctgcttttcatcacctgccgtgcatttctgcagaaaaaacggttccgcatgctgatctacagcatgggagccattattctgctgctcagatggtggtggttattttccggtatttatctgcagtgccctgttatctgaccggaatccgggcaaaaaaatgccgcactgaatgcggcaattaagtcatgagggtattaaattaatactacataacattgataagccagccagccgagtacggcacctgccggtaaatcaataatataatgctgtttggtgaacatgcaggataaggcgattaacagcgggaacatgaatacccatggtccgagtgtggcataggccagcagcgcggttaatgtggcaacagagacgtgcatgctcgggaaacagttggatgtatcgtcgaatttctgcacaaacagcaggaatttttcggacgctttcttcccggtattcatttcgcgccagtgcggcggcgtggcaaccggatacaccacaaagaaaaacatctgcatcagtaacaggataacatagctgaatacgatgatgataaactgacgtgaatcctgaataatccagttcagatagagaatcgccggataataaagaaagctgtagatccaggaccaccagggccagaaaggaattttttcatccagtgcagagttaaatgttttaaccggcctgaccatatgacgttgcgtaaagaaataaaactgatagacacctacgataataataccactgagcaccaggtgaataaccctgtcgataaacatcatctgaaaatttccttttaaaaaaaatcaattaaactgcttttctgattttcagcacaccgtgttttagcataccagggcacgaaatactatcgtgtcattttatgttgaattgtaaaatcagaataatatcaaggtactacagtcagttatcacaacaaggaaaattcctaatttttcagcaaaatagtgtcactctattgatttgacggataatattttataaacccttcaggttacggtttaatttatccggcaggctgttttaaaagtgtaaaaccagcaggtaactatttatgtcaacaacactcacactgcgggcagtaacaccggatgagattgccgcactcagcaacgccggatattccgcataccgctatcatttttctgcttactgggattcagaaacagagctgaatgcttatctggacagtgaatatcatccgcaggttattgcacagagtatggaaaataccggggtatcctggtttttcatttgttgcggcaataccattaccggattttgcaaactgaccgaaaacagtccggtaagcggaaaaacgtacagcggaatgctgctcaataaactctattttttaccgggtgaaaccggaaaaggatacggaagtaccgcattttcgctggctgaagatattgcccgcgcccggggacaggcatgcctttggctggaagttttggagaataacaccggcgcccggcatttttatcagtcacagggaatgaccgtgaccggctatctgccgttcattacagaacaacaatcctcacacctgctgattatggaaaaaccactgtaatagtgtttctcataaatctgataaaaatgagtctgttaccggcagataagccgccataaactgatttttccttatctgtttattatctgccggagaaacattatgacccagacttctgcctttcaccttgccgcagaaagtacccagccacagttgcatatgctgacgttacaggcactgaatatgatcccgcccgcctcttttgtggttcctgccacatcaccgcagggaattgccaccaccattctcagcatggtgctgaaactggtctataaaaaaatgactgagccaaaagaagtggatgtcattggtattattcaggaaacactgatgaaaaatacctctgaatggctggaatcagaatatcaggccgtccgcaaagatgccgaaagtctgcaggatgctatcagttcctggcagaattcaccgacagaagaggcgcgccagctgattgtggtgcgcaatgaaattgctgtcgcggatatgcgccggttatgtattctcagcatcaatactgcgaaaagcagaggtattgtccggctgtgcggcgtgtgtgccctgtcctgcctgctctatttctttacattgcgcgataccctggtattcggcaaaagctggggatacgcctctgatgtactggaaaagtacagcaaagccctgacggaacaggcggatattatgtttaaggacgtgctgaccgcagaaatcaataattacaccgaaaatgatgatttttatgatccggaaagccaggccaaacgctccgttatttactggacatccgggtacaccaatattcaggatcatctgacttacggcgcgcagcaaaaatccacacgggtctgccctgaacgcagcgatatagccgctaacccggttaatgctgaaaatcatacggtttatctcggcaatctgtttctgaccaccggaaattcttccgttaacggcagctacaattatttatccgccaccggaccccgcagctatgacagaggcggagaaccggtcacactgccggtcacaagcgccgggcagtataatatccggctgtattatgcctatatgaccaactccctcagttttgattatgaaactcagcttcggattgaacaggccggaaaaatcatcaccgatgctcatctcaccgatttaaccaaaacggtgctgacaccatataaatccggctcaaattacggcccggtcatttaccgcgagacacaggtgaaccttgaggaaggcgatattgtgctgacattccatgaggaccgttccctttccggcggcggattgctgcagcatattgaatttgtgaaagtataataggcgatattaccgtcaccggaaaaccggtgacggtatgtccggatcactccggttgcagaatatccgtgatctgctgcggtgtcagcgtaatcccataaaacgtctgataaaacgcggctgtttcatttctcatatcaatatccgcaaaggcgtccgggtacagcactgtggccagccagagaaactgcaatgcctcctctgacgtttcgcggcaccaccagaacataccacgcggattggtatagacccgcccgttacgcacggcatcaattgactgccattgcggcgattgctgaataaattccgcatcccgccggttcatcgcaataattacctgcggatcagccgcgataatctgctctgatgatacctctccgttagcactgctgtgtgccggaaaccagttttccgccacattaaccgcgccggccagatccatccagtcctgattaagtgacggccgaccggaggtatacagtggatttcccatgctgtgatacacccgcagacgggcagaggcaggaacgttttccagccgttcctgcacgcggcggatattgtcccggaaatagcgctcatattgcgccgccttctctgccgcatccggaccaagcgcctcgccggtcagttttacccgctcccgcagcgcatccatactgttggctttaaaagccagcacacggacaccggcctgtgccagcacttcctgctgcggaacgcggatcccgtcatgaataaataagatatctgtccgcagactcagaatttgttcaatattcagctcatttccgccggtagtgccgatgaccggcacatcatcaatctgcggcagcatctgacggaacagcgggatctgtttggcaacccgcgaggttccggtgatattaccgccgtaacccagcatcataataatcgcattctgcgccggccacggtgttgctatccgcagtgccggttccggcggggtttccgccggggtactgaaagcgcagatactgacaaataacaggcataacgctgataaatagtgccgcatcacgctgcctccgtgttaaaaatcaaatgatacggtggcccggaattcacggcctgcaccggtaaaggcattggcgccgccatttttgccgttactgttgccggggaagatagacgcccagtaatgctcgttggtaacgttatccgcagaaatccgcagtgtaaccggcacattttctatctgagtggtatagcgggcaccgagatccagtgtggtatagctgtccgcccagctggtgttggtatcatttgccgcccgtttgccggtgtaatgaatattggcactgtatacccactgcggaacagatggcaggctgtattccatcagcaggtttgcctgtactttcggcaccccgacaacccgtttatcctcagtttggttattacccgtatccgtcagctctgctttcaggaacgtgacaccgctgtagatattcagcccctgccagacattgccggtagcggtcagttccagcccgtcattcacctgttcgccctgttttttaaagatctggtcgctatcggtataagcaaacggccgtttgaggcggaaaaccgcggcactcaggttcatattgccggtattggctttaataccccattcatattgtgtactgcggtacgggctgagtgtttccccccggtttttgactttatcatcatccggtgcggtatccccgggctggagagaatcggcataactgatataggtcatcacgtccggagtgattttgtacatcagcgccatattcgggctggtaccggtctgctgatcgcggtcagttttgtgtccctgcttatcgaagttacgggtcgttatccagctctgactgacatacaccatggcagaccattgtgggttaaaagtgacagtgtcaccaatgataatgctttgctgctggttttcactggctttgtagcgttccccgccggttctgatgcggccatctgaaggctcggtcatggaagacgggtcatacatattggtattgccaagctgaaaggttttaccccgctctttggcactgtaaattgaccaggtataaccggtggtggcgagtgccacatcatggtttaccgaaccggtatcaaactgaccgttcagggcaagattattgctcagtacgcggaaacgaccggcagccggagaatccgtgatcgagcggctgatagtccctttactgtccagaatttgcgacgaaacggagcgcattgcccgatccgcctgctgatagccgataccgccgctcagtgaccagtcatcattcatataatgggtgaaacgggtactgacggaatctgtcgtcaggtcattaccggcggtattcagtgcaaggtcagggttggaactgtccggtgcattcggtaaatcaatatccgggccgtaaccaaaactgccgggaaatcctttggtcacaaaatgatagtgactggcatccagctgtatctgtgttcccggccggatctgccagtccagggcaactgcggccagctgacggcggattttactgttccggacataaccttcaccctcttcatccagtaaattcaggcggtagccgaaagtcttctcttcatcgacctgaccgccaagatccagatgcgcactgtaagcattacggttctgatatcctaccgtcacccggtgcagcggatcctgagtcggccgtttggagataaaattaaactgaccggaagggctggccgggccgtaaattgcgccggtcaggctgttcacggcatccagccgctccagcatttccaccggaaacgcggtggtggagacaatattcaggccgttcagtctgctgttttccaccacgctgccctgcattccccggctctgcggacggcccacatccataccgccgcgggcctgcatctgagaagacggcagatatttcagcatttcactgacacttttactttgctgattgcggatcatcgcttcgctgaccgtattgctgctgtagggaatatccagccactggcggggaccaagcggccccatatcaatatctgtcgccacaaaaccggcaccggcctgggtttgcggggtgatatgtgaaggcttgtccgtcacaattatggtatctgccagtgcctgctgcgccggaaaaagggcaacagaaatcagcgcaggcagcagtgcccgcgaaatatatttagtcgtcatagaaccatccgttatcgttttactgttatcgttatatatttatatatacagcgtaaatgatattgattttcgcttcgggtaaacgtgatcggtatcaatgagttccggaagagataatttctttcgttattattactttttgcaatatatcgggctgagaatgcaccccgtcagtgccgtagcgcaaaacaatagcgcggtaactgcgggtaataatatctgactatcctgatgtgccgctgccaccggtaataaaataaagatgctcagattattcatgctttctgacaatgccagagcttctcctttacgagttccggcatgctcagcaatgatggctgtactgacgggagcggcaatccccaaagcgcatccctgcagtaacatccacaacatcatccccggaagcccgcctgttccgctgataaaaccggcaatcatcacgctcatcactatcaggctgatgagcagcagccgggtatctgtgccgcttaaacgccggaacagcggcatcaaaagattcccggtcagtaatccgccaccgaatattgcactgataagccctatcgtttctgtattcagcccgaaccggtcacgcagcaattcaccactaagaacaaacataaccactgcagtaccgttccacagaccttttgccgtgatcagccccgataatgccggtgaataacatttaccgggcaggattgacggttgagaggaaacccggctgacaccgcgaaacacaaaacaacaggctatccacatgaccagacttccggctgcagtcagcaaaaaaggtgcataccagccgcagcggactgtcagccatccggcaatcaccgggccggagataataccggcggtcataccggtcataaccaatcccatcgcggaagcctgtctgtcctgcggaaattgttccgcaatcagtgcaaaaacagatgggatcagcgcagcagaggccagtccgcccagaacacgcaagcccacagccacactgaaactcggtgccagtgccagtgcgataccatccgccacaaacagcaataatgcggcacgcaacatccggtaacgaccgatacgatctgacagccgtcccagcaccggtgcggcgagcgcatacgataaggtatacaccgcaatcagccatgaggcttgcgcgggtgtgacattaaatgcagccgccagcggcgtgagcatcggtgaaaccataaattcagtaacgccggtaaaaaataccgtgaatgccagtaccggcaatgtataaggtgaaatcataaaaatcctgtataacgaaatgaaaataaacgggttatggattgaattcactcatcaggggaaggtaaaacaggcgaaatgacaggcagactgagggcgcaccgcagataaacagcagcatattcagaggataaataagagggatgtgaaacagagcggaaaatacagaaggtaaaaaatacgaaaccggcagaggataccggcggatatcatatcaggaataccggctgccggaaacccggcagcatcagtggcaactataatcagttctgtttttgctgccagaaatcatacagtgacggctcaccttccggttttttctgtgtaaaagagaaacccggctgttcatgtggatctgcccgtaaagccagtgcaatggatgctgttgataaaccataaggttccgcatctgcattggaatatgcatagacggcacgggtcacacccgccatccgcattgcggcaagacacatcgggcatggctgtccgctggcatacactacgcaatcttccagccgggtctgccggaggtggttaccggcatggcgcagagccagcaattccgcatgggcggtcgggtcatgcagttcaagcatctgattaaccccttcaccgacaatttccccgtttctgaccacaacggcaccaaacgggcgaccgcccttttcgacattccggcgggccaatgctatcgcctgagccagaaattcactatctgtcatcagttattccttatgattaattaacgggggattcccataccgctttcccctgccattgtgtttccagtgtattgagaaattcacggactttcggtgccagaaattgttttgacgaatataccgcacacacgggctcgcccggcggtgtaaatgcagtcagtaccggctgcaatactcctttcgctatctcaggcccggccagaaaagcaccaagctgacagattccgccatcagccagtgcagcatcaagaaccgcgccggtatctcccagactgaaccggccactgaccggatgcaactgaacgtctttatcccgcataaactgccagggaacatttcgcccccggtgacggaaaataagacactcatgtgctgttaactgttccggtgtttccggtataccgtgccgtaccagataacccggtgatgcacaggttaccagacgatgaggcgccagaactttacgtaccaggcggctgtcatcattaccaccgatacgcactgccacatcaataccttcctgaaccagatcacagtaatcatccgaaaaactgacatcaataccaacatcgggccattgtgcggcatactgttgtattaccggcatcacataattgcggccaaagaccacaggaacagcgacccgcaatgtgccggaaggtttttgtctgccttcatataatgcattttccgcatcatccacctcggataatatccgtttggcgtgcagataaaaacgttcgccttcttccgtgagacgcagccggcgcgtggtccggtgaagcagacgggtactgacacggttttccaggcgctgaaggcactttccggcagcagaacgtgaaatctgtaatttttcagctgccgatgtgaaattaccggtttcactgacccgtacaaaaaccagcacatcgaataagttatccagcagtaaaccatttttatctgccacgatttgtccccggtgtttggccaaaggtgatatttatctgtcatactggcgcagatagactctcttctcaagtaaagttattaccatgaggaatgtatgtcagacagtcattgtttatcactttcattgccacctgcccgccggggatggttttctgttgttgcgctgactctcgcaacctttgctgtggtgactacggaaatgctgccggtcgggttactgacaccggttgcggcagagttccgggtgccgcaggcgtatgtcagcctgatgctaaccataccagccctggtcgctgcgctctgttcccccctgattattttgttcaccggccgcctgaaccgccgttatttgctgatgatactgatgctgttattaatggtagccaatgtctgtgcggcaacagccccccacttctctgttctggtcgcggccaggattattgtcgggctgagcatcggcgggatctgggcaatcgccggcggaatagctgtcaggctggtcgattcccggtatgtggcacttgccacttctctgatatttgccggtgttgccgccgcatccgtactgggaattcccgccggagtgatcctcggtgaatgggtcggctggcgtggtgtgtttggtatcatgagcctgttttccctggcggtgttgctgctgatgctgaatcttccctctctgccgccggttcaggcaccggttgtccgtgattttctgccccaactccgccacccggttatccgtacggggttgctgatcacattactgctggtgactgcccactttatggcatttacctttgtccgcccgattctgcaacgggatcctcagttgcaggcacatgaactcagcgggttactggcgctgtacggcattgcaggtattgccggtaattttgtgctggggttattgtccggtcgtcatctgttccgtgccgtattctgcattaccggcggtattgctctgagcctgacagggttactcctgctgcctgccgttcctgcatcgcacatcattattctcacgctctggggaatggcatacggcggcgtatcggtgacgctgatgaactggatgatccgctacagcgcacaggcgattgaaataaccgggtcactttatatcgcctttttcaacactggtattgctgccggatctgccgccggaggcatgatggtgtctgcgttctccttacagggaaatgtcattgcagcactcatctgtgctgcaatagtgctgatactgatttgcggttttgttatccgcttataccggccgggacgtcaccggcaggccaatctcgatcaggtttaaatccgggtcacggaaatagactgatattatcgggccggttgcccccgtgcgttccaccggcccctcttccacaacaattttttcttttgccagatgcgccagcgtctgttcaaccggggttccggtgagaaagcaaagatcggctgaaccgggtaccggtttatccgcattcggcagaaattcatttcctgcctgatgcaaattaattttctggcggccaaacaccagagccttgcgatccccgcgaaatataatgaccgaaaaacccagtacacggcggtaaaaatcacaggttttttcaacatcggccacagtcagaaccagatgatcaaggtgtgaaattgtaatcatcagacaactccctgtatcgctgttattcgtacattacgtggtatcacattggctgaaaatacacaattcggggtattttctttttttaatacatccgtaatgatgcactacagacaggaaactatttccggctgccgggcgcgtgttatgcggtaaatcagatatgcggcacacagtgccatcagcacattaaacccgagactgacactgtaaactgcggcaggagcagataacagtacgctatctccgctgtgccggagtgaaaactgtaaaatgaccgatactgcggttgcaccggttgccgcaccaatctgttgcaatgtggctgtcagtccggatgccatcccggcctgtgccggtgtaacccgggacagcacaatgttcagcatcggggtcatgatcatgccctgtgtgaacccgaccaaaaacagaaacagactgagtatcgtatttgcggtgctttgcggcaggaaattcagcccggcgattaataccagataactggcggcataccctaatgctccgtaataaatcaccggttctccccgtccgataatcattcgcggggtaataaaggaggcaataacaaagccgatactggacggtacaaaaatcagccctgcttccagcggcgtagcacccataccgttttgcagtaacagggaaagtatcagcggaaatgcagatgaggtggcatagacacacaatacagcaccggtgccggtaacaaatggccggttgctcagtacggcaatatcaaacagcggtgtccgcccggtgcgtgataaatgctgctgataacggacaaaacagaacaacagaaccatacccgtaagcagtaatccggtactgaaaagtgtcagaccccaaaccggtaacatcagaagcggtaacagaaatgcggtaatacctgcggcggataacagtacgcccggccagtctgtggtgagtctgcccgcaacgcgcccctcctgtaaatggcgggacaataccagtgccagaataccaacagggagattaaccagaaaaatcagccgccagctcatatcaaacagattcagggtaataagccagccccccagtgcctgaccggcaatcgcggccagccccagcgtcatccccagccagccgaatgcttttcttgcctgtgtttcatcaaaattcaggcgaatacctgcatacacctgcgggaacagcaatgcggcagccagtccctggataaaacgggcaatcaccagcaatagtgctgtcggtgcggcagcacacaacagtgacgcgagtgtaaaaaaggccattccggcctgatataaccggcggcgtccgtaaatatcgcccagccgtccgccggtgatcagcagcaggccgaaagccagctcatacccggcaataatcagtgtcagttcagtgaaactggcctgtaagccgcgttcgatactgactatcgccacattgacgacaaacagatcaaaaatagtgacaaacccggcgaggactaatacaaacagtgcaatacgttgttgctgattcatgtttttctcattttgccatttttaaaagcaggaatgagactataatcaggtcgttatcctgttacaatttaaccatttatactattactaatagtaacagggactaaagacaacatagcataaggcatctgataatgagtgaaaacccgcgcacacggccggaactggctgattttttacgcaccaaacgcgaaagcctgaccccggaatgcgtggggctgccgcacacttcacgccgccgtactcccggtctgcgccgtgaggaagtcgccgcactcgccggggtgggtctgacctggtacacctggctggaacaagggcgtgaaatcggagtatccacccgctttctggacaacctggcacggacactgcgtctgaatgaagcagaacgccagcacctgtatctgctggcccatcagcgggttccggaagcctccggagatacggagcatcatgtgccgccggttatcacccggatgctggatgattttccggataattatctctgctatgtgctgaatctgcactgggatgtgctggcgtataatgaaaaagcagatcgttacctgcacttctctgaagcacagcccgggatgtgtaactttctctatttgctgtttaccgatccccgctatcagacccgctttactgattgggaaaccgatgctcagcgtctgctggccagtttccgccgggattatgccagaacaaaacatgaccccaatattcagcggatgataacggcgttatgtcaggaatctgcggcttttgacacgttatggaataaacacgaaatatatcagccctgtaacggcatccgtgaaattgaatttaacggcagacgggaaacctacgagtatgcgtccctgacatttgatattgataaatccaaccggttgctggtgtatacgccggttaccggtgaggattaaatcaccgatgccactgccagcagtaatgccataaggatcattaggataccgccgcacagattaaaccagcgcagactgtttccccggaaaaatgatgcggatttaacagcatgtgcggcataaacccagataatatcgataacaatgcccagggctatcgggatcagcgacatcagcagcaacacagtggtagcggacatctccggcggaatttcaccggtaaatccgggaacaatcgtaccgaacataatcacagatttcgggttcgcagccccgacaataataccggcaaaaaatgactgatggcctttgtcagccggaacatccatcgccatactgatacgggatgcccggacatactgccagccaatcagcaacaggatgaatgccccgatcaggcggataatcatcaggatctgcggagaagacatcagcaccgcgccaattccgaaagaaagcaataccgcaatgctgtacataccgatggtattcccggcaacgcctttcagggcatttttcttcccggctgataacgcctggccgaccagaaacaaaatactcggccccggaatggcaatcagcacggagctggtgatcaccagccccaaaataccctgtaaattaccggtcatgacccctgaccggcaaaatagtctgtggcccgcagcaactgatctcggatccccggttcagacatcgcgtgccctgcaccttcaatcaggtgcagcacagatcccggccaggctttatgcagatgccacgcaaaggttgccggacacggcatatcataacggccgtgaacaatgattcccggtataccctgcagccggtgaatatcacgcagcaactgtccttcctccagccagcactggtgataaaaatagtgattttccagccgggcaaaggcgatggcgaaatggtcaccggtaaattcatccagatgctctgcatccggtaacagtgtggtggtttttccttcccacagagtccaggctttggccgccgccagctgaacctgaacatcatcaccggtcagcagtttatgataggcagcaatcatattgtgccgttcctgcaccggaaccggtgccaaaaaggcttcccactcttccgggaacatctgtgaaacgccaaattggtaataccagttcagttccgcctctgtcacggtatacacaccgcgcaaaatgatttcactgacctgctgcggatgcgtttcactgtatgccagtgcgaggctcgagccccaggagccgccgaataccagccatttactgacaccgatatactttctcagccgttcaatgtcctccaccagatcccacgtggtgttatgggcaatttccgcatgtggtgttgaacgcccgcaaccgcgctggtcaaacagcagcacatcataacgggcagggtcaaaatagcgccggtattccggactgatgccgccgccgggcccgccgtgcaggaaaacagccggtttcgcgccgggtgtgccggtgcgttcgtaatagatccggtgaccatgaccaacatcgagaaaaccggtctcataaggctcaatggccggatacaaagtacggaatgttgtgtcagaagaggttgccatagcaaaatcaccggttagcagtaaacagaattcaccactctaatcaataacccgcataaaagacaagcagtccgtggatttacatcacggactgccatactattttaacctgctgattcatttatatagtcgtgcattgctctgcatctgaaacagacttctgcggttttgtccggcgtaaggttatccgcagcaccactaatccggcggcggctaccgccgcccctgcataactgacaccggcataatcaccaccgtttgccagcaccgatgcgcccagcgcggcaccgactgcattgccgagattaaaggcaccgatattgactgatgaggccagcgcctgtgcttctgaggctacctgcatcacttttacctgaagcggcggaacgataccaaaactggccgctccccagataaccagcatgatccccgcagtgacagtgtcacgggccacaaacggaaacagaaccatcgtcagcgccagcagtgcaaataatccgtacaatgtgcgggaaacagaacggtttgcccatactccgcccagataattccccagtgtgaagcccagcccgaccagaaccagcatgatgctgatctgcgtttccggcacagacgagataaaggtcagtgcgggggcaatataggtataaaacgtaaacatggcactggcacccagcacagtacacagcattgccagtaataccgccggacgggtcagtacttgtaattcacggcgcagattaagttcttgtccctgcatattacgcggcagtgatcgcagcagcgccgccattgtcagcaagccgagaagactgaccacaaagaaggattcacgccagcccagcatctgagacagtttggtgatcgcaggaacgccgccgatattggcaatggtcagccccataaacatgcccgcaatcgccccggcttctttgcctttggccaccacccgtgtcgccaccatagcgccgataccgaaaaatgcaccgtgattcagactggtgataaagcgggcaaacagcagtgtattgtaatccggagccagtgccgacagcacattacctgccgtaaagatgctcatcagaaaaatcagtgccgctttgggcgaacgccggatcagcagtaacgtcatcaccggtgcacccagcatcacgcccagtgcatacaccacaaccagcatcccggcggcgggaatggaaacagccagtgacccggcgatttccggcagcatgcccatcggggaaaattccgttgccccgatagcaaacgcgccgacagacagggataacagagcagtatttgttcgcataatgtcctcagaataaaaaacaacgtcacagtgttgtcaggacggcgattctgccacattgatttttgcggaaacagccgctaatctgcaaaaaacaattgaataaaacgcaataatgaaaatcactctggaagaaatgcgggcatttattgccgttgttgacagcggctccgtcaccgccgctgccgcacaaaacgggctgaccgtttccgccatcagccgcgccctgctgcgtcttgaagaaaagatgaacagtactctcctgtaccgcaccacgcgacggcttaaactgagtgaagaaggcgcattgtttttacaaaaagcccgtgatgtggtgcaactggcacaggaagcggaagatgtgctgatgaaccataaagagatcccttccggcacactgcgtattgatgcctcaacacctgttcagctccatgtgatagcaccgctggtgacacaattccatgaacgttatccgcaaatccgccttgaactgaccaactatgaaggcatcaccaatttactggaaaaacaaaccgatatcgcattccgcttcggtccgctggcggattcttccctgcatgccacgctgatgggctacacccgccagcggattctggccagtccgcgttatcttcagcaacatggcgaaccgaaaacgccggaagatttggcacagcatactctgctgggatttatcgcaccggaaagcctgaatacctggccgctgtatgacggcaacaaaaagggactgaaaattaccccgtcactggctgcgagcagcggggaaattatctgcaacctggcgcgttccggtgcggggattgcctgtatctctgattttgtgacacacgaaatgcgcgaaaacggggaatttcgtcaggttctgacgccatacacctatgaaaacaaactgccgattaatgcggtgtattaccgcagtcaggcactttctccccggctgcgctgttttatcgattttgtcctgcaacatagtcagtgttttaaacgcaccggttaatctgaacactaccttaagccgctgacggcgcatctcagtatcttctcgacaatatttttcagcgcaattagtcttaaaataaacctgccctgtaaaaataagagagaaacaataatgcaaacggcactgaatgcgctgacagcgggcttttcaccggatgagcccggcgttatcgtcatggtacataccgataacggcgcaacatggtacagctgccggggcatggcggatgtggcaacccgcacgccggtaacaccggacaccattttcaacttagcctccgtttccaaacaattcaccgcattttcgctgctgttactggtgcaggaaggcaaaatttcactcagtgattctgttttatctgttttgccggagctgggcgaatatgcccgtccggtgacattacgccacctgctgcaccacaccggcgggctgaaggactatatggatctggcttttgcccgtaaaaccggcttttatgacccgctgacaccacaggaaaccctggcggatctggtcagtcagacagaagcggattttccgcccggtacccgccatgattacagtaataccggctattttctgctgtctcaggttattgaacgggtcagcgggcagtcatttgctgatcttgcccgtgaacggatttttgcaccgctggaaatgaaccatacatttattgttgagcaatatccggcaccgcagaccattgccaccggctacggcaaagctgccggtcagtggcggatttctgaaaacccgtggacacacaccggcgacggcgcggtacattccagtgccgctgacctgatgaaatggggcgaaaactaccgcaccgcccgtatcggtggtactgcgctgatacaacagatggcagcaaccctttccccgctgacagaaaacggcacacccgttacggattatgagccttatgctgccgggttacatacccttcatcatttcggtgagctgagtctggaacatgccggaggctggatgggtaccagcacttactttatccggctgacaaaatcagacaccactatcgtcgcgttatccaacagcgaagaatgcgataccgaaacgctggcccgagccgctgctgccgcctttctccgccctgcattccctgcgatgatcactgttcgcggggacgaagaataacaacatgatacagcgttatttccgccggacacttgccgggcttgctctgctgttactgattgccggactggtactgttttttaccagccatcttgatgattttgattttgacaatgcagtggcaaaagaactgaccttcacctcacagggaaacaggctttccggtaccctgctgctgcccggcaacggacatccggcagcggttgccgtgataatccacggtgacggcccgcaggacagatattcagacaacggctataacccactgtttaataccctgctggatgccggtattgcagtattttcctgggataaagccggtatcggtaacagtcaggggaactggctgcatcaatcaatggatgatcgcgcagaggaagccgtggccgcactgacattgctgcaatccctttatcagaataccccggtgcagattggttttcttggtttctcccaggcaggatgggtgatcccggcagcggcagcacaatcgcagcctgatttttccgtgattatcggcggtgcggtgaactggcgggatcagggacaattttatcaggggctgcgctacgcacagcagggaaaatcgccggaagacattaaacaattgctggcagcagagcaggcagagaatgaccggatatttggccgcaatggctcaaaaggcccggcgcaacgtagtgatatgacacccgaccgttttgaatttgtggtcaaaaattacctcagtgatgccacccccgcgatcccgcagatgaacggtcgtgtgctggcggtatggggcgcggaagatctgaatgtcgatgcccggcgcaatgcctgccgttatcagtcacttttgaaagataatccaaaggcaaaagtcatcgtctttccgcaggccgggcacggtttattacaggcacccgcctataattatcagctcagcagcgactggccggtactgcgccagtggcagtttctgtatgccggacgggaagcctatcatccgggagcattgtctcttatcactgactggataaaaaacaaaaccccggatttgacagcgtattacccggcgtgtcagtcctgaatcatctgctgataacaggcataaccccgcttcgctgcttcgtgatattgccggttcagcggcgcggtcatgctttgtgatatggcggtcatttccggccctgcgagttgcggggaaccggtgcggaacggcgggcgcggggcatatttaatcgccagttcaaccagcgcagccagttcctcaccccgcagggctttcagcaccagtaatgaggcatcaaacgagccggtagccgggccggaggtgtagatagtatcgtcgatcaccacttcactgccgccgacggcaacagcaccgacatccggcagcatcggcaccacattactgttgctggttgcccttctgcctttcagtaatccggccgtgcccagcatcagcgaaccgtaacaggtgccaatcacgtattttgctttttgccctgcctgcgcgaaaaagcggatcacctccggatcttcaatcacttccggcggcaccatgccggtcaccagcacatccagatcatccggacactcatcaaaggtcattgtcggcatcgtcggccagccgatatagccctccaccagctcccggcgtttccagataaaatagatttccgcccctgcaatcgtaaaaacagactgcgcaccgttgatatccatcggcatataacccggacagacaaaaatgccgactttcagtaatgcgggctgtgatgcgcgtccggcagcgatcagcgcctgaatggaaggcgtgctcagcccgtaaatcgtttcaactgcataatcatgatcagacatcaaaatactccgtgacaacatttatttactaaccggtaaaataatgcatgaggtacaatgatgtaaattgtttttatactgatcggtaatcaaatggcacaaaaaggcagaccccggaattacgacagtgccgccgcactggataaaatcatggcgcagttctggcgcaaagggtataccgcaacgtctctcgatgagctggccgcagaaacagatatgaggaaacccagcctgtacgccgctttcggtaataaagaacggctttatcagctggcaatggacaggttcggtgaaatcgctcaggcgcattactccgccgcactggcaccgcagacgcccggtgagccgctggccgcccgcctgacccgctggttacaggcaaccgtcaccctttataccggagagcacggccctgccggatgcatggtgttatcgacagccgctgcggaagtgtacgaccctgccatccgcaagcgtctgcaggaagttattgcggcacaggagatgatggtgctggattgtctgaatgaagagaaaactgcgctgtgcgatccggattgcgccccgctgctggcgaaaacactgaccgcgtttctgcacagtatttccctgcgcgcccgggccggtgaaagtgcagagcaactggcagagatggttcgtgccggtcagctggtattgaagtctgcactgacatcaccggcggcataatatccgccggtgagtatttttcagcgcagtgaaacctgaccccggatacaatctgtcaccgcaccaccgacccagatcccgtccgcatcctgccggacactcagccagccgtcacgcttcacactttcaccctgccgcgccagatagtgcggcggcaatgtgccgttgctgataagccactgtgccagtgctgcattcagactgccggttaccgggtcttccgcacctctgcggttaataaatgcccttaccgcaagtgcggcatcactgcctgccggataccgtgcacacacgccgattttatacagcgcgttattccctgactggctgagcaccgcataatcgggggtgattgccagcaggcgggcaacggaatccacttcaatccctgtccatgccgggccgttatcaatatattttgcctgcaaaatggcactgcgggggatgccgtatgccgatgcaatcgtattgcactcgtcttctgtcagatcccgctcgttaatcatcggcggtgcggcaaaggcggttccctgttcagactgacgcagcgtaataagcccggcggcacattcctgaatgatatcccgcgtttcactgaaaccggtatgctgcttccagacatgagaactgcccagggtcgggtgtccggcaaacggcagcccaccatccggggtgaaaatacggacacggtaatcggcctgcggatcctgcggtttcagcaaaaaggtggtttcactgaggtttgtccagcgggcaaa

SEQ ID NO: 41 - DNA, 800 bp, unknown
  Altogen 322075 strain
attcctcatccgtcagatcatccgcatcaaccaccaccgccagtgcattacccagcagcggcacatcagaaaacacatcaacctgataaaaggaatgggttttattgttcacggtaattatccttttggtttgttttcagtcagcgcagcgctgcctgtccggtgatcacacaggtcacatccccggcaacccatgcctgacccgcttccttagtgacaaaaattttgccgtcacggctgataacctgtccctgcccggccacatagcattccggtaaaataccttctccggtcagccactgggcaagcgatgcattcagactgccggtcaccgggtcttcttcccccagagaacagcataatgcacggacttccagctgaaccggtccgttctggtcatcatacagtgcacagaggccgatatcgtacccgtccagcagggaataatccggtttcgccgccagcaccttcgcaacagaagtcagttgcagtccaatccatcccggaccgttatccacccatgcggagtgcaccacatcttcatcacgcagccccagtgctttcacaatatatgccacctgctgcggatcagtatccccgccgcgcaacagtgcaggggcagcaaatgccagccggttatcctgctgacggatagtcaccataccgactccgcactcctgaatgatatcgcgcttatcattaaactgctgtgtttcgcgccagacataacaggtacccagggtcgggtgtccggcaaacggcagttcaccgtccggcgtgaaaatacggacacggtaatc

SEQ ID NO: 42 - DNA, 55107 bp, unknown
  Altogen 322075 strain
cgcggatcctgcggtttcagcaagaatgtggtttcgctgaggtttgtccagcgggcaaaacggtgcatttcctcatctgtcatatcatccgcatcaaccaccaccgccagcgcattaccgagcagcggtacatcagaaaaaacatcgacctggtaaaactgataagtgcgggtattcaaagttattatcctttttatgtggtaacagagcagagctgatgatttttatcacagaaaacgattatgatgaaatcattaaccatcactgtgataaatctctcatgcagaaaacggattctttttccgggattaccgcttttgtcgccgccgcacagcacggcagttttactgcggcagcagacaaactggggatcaccaaatcagcggccggtaaacggataagtcagctggaggctgctctgggtgtcagtttgtttcagcgcggcaaccggcgtattaccctgacccctgccggagaaaaatatctcgcccgctgcctctctgcccttgccattctcggtgaggcggaagacgaaatcagtgaacagcaaaccacgctgagcggccggttacgtattgatttaccggcagcattcggccgctgccgggtgatgccggtgctggaaaagctgatgattcagcatccgcagctgatgatgagtatctctttccgtgagcggtttattgacctggcagaagaaggcgtggatctggcgatccgcatcggtgaaccgcctgacagcggtcacctggtcgcccggcagctgaccacccagacgtcggtattgtgtgccgctcccggttatctggcgcgggccgggaccccggcggataccggtgaactgatgcagcaccgctgtattaccggattccggcgcgataagccgttttactggtctttgtattgtgatggtcagcttttacgcattatcccgccgccgttttatgagctggcggatggtgatgccatgctggcggcagtgctgggcgggcacggcattgcccagctgccgctgtggatgatcggtgataatctggctgacggctctctgtgccgggtgctgcccgcctgtgacggcacacagaccccggtgcatattctccgtccgcagacggcgcagttaccggccagaacccgttgtgtgacagacgctctgctggccgcagcacaacagggggagtttgattaaccggcgcggcatacggtgtgtgcggcggcctgttgccggactttcagccgtattgtgataaaggctgccgccgcaaaggcaattcccgcccagatgatggtttcaacgccaaaactgcggatcatccgtccgccggccattgcgcccagggtgatcccgagattggaaaatccgatatacagactgttggcaaattctggtgtgtttccggcttcgcgcagcagccaggtctggctgacaatcagcccggacgtatgcagtattccccagagcaccaccaccggcaccatcagccacgacgaagcaccgcagagccagaccgccaggtaaatcaggataaacagcagcggatacagtgacgtggttttaataacattgcgctgtaaataccggctgaaaataaagttgccgaaataaccactgataccaaataccaccaataatgcgctggtcatattgttggaaaaaccggtgatagtaacgagataatcggcaatatagctgaacccagcaaacatcgcagaaaaaatcagtgtcactgccgcaatactcagccacacatcacggcgttgcaaaatcgccagctgttcacgcactttcagcgcctgtgtcaccggtaatgacggcacaaacagcgcgatccccgcaaaagcaaccacactggtcagcgcaccgaaccagaatgcagcactgagtgtgaaaatttccgcaataaaggcactgagcggcattcccagcaccatgccgacagccaccccggaaaaaacaatggcaatcgcatgggcagatcgtgcaggcggcaccacattggcggccaccaccagggcaatggcaaaaaataccgcgtgcgtcagtgccggtaaaatacggaaaaacagaatcacatcatactgatgcgtaatggcatacgcgatattggaaataataaaaatcgccataatcaccagcaaaactgttttgcggttatagcgtcccagcatcagcgtgatcgcaggtccggtaatggcgaccaccacggcatagatactgaccagaaacccgacctgcggtgccgtgatctgcaactgttccgtcagttgcggcagcagaccaatcaccgccacttccgtggtaatgacgccaaagaccgccagtgacagcgagagtaaaatcagcataacgttatttttcatagagatacccgcaggacgcacgatacatgctcctgatataaataatgtgaattgatagtgcggatatatccggtgcttatcctgccaaatctgcgatcagcacggaagatcagtcacggaaactgtcagtagcaaaaaagttgacactctccggaaagcacagtgtcataatggctgcaaagcacacattcaccagagtgataaaggaacagaaatgacggcaaaaatgatcgataaactggcactaatcacgctgaaagacggcaaggtagccatggtccgctcccataacaaaaccctgttctacgcgccgggcggcaaacgcgaagccggtgaaactgacgaacaggctctgtgccgcgaaattgacgaagaactgacggtgacactgaaaccggacaccatcacgttttacggggaattcaccggtcaggctgatggtaaacaggacggcacacaggtgcgtatccgctgttatcaggcggaatttaccggcgtactgcaaccggccgcggaaattgctgaactggactggctggacagccgtgatctgccccgctgttctctggtcgcggcactgattgtgaaagacctggcagcgcggaaactgatcggctgatatcacgcagctgcgcaattttgtacaagacagaatgtaacgcagcgcgataataaccggttaccgtaaagacagagcaggacacaccatgcagagtgacgggcattgccgtgaacaggctgactattttcatctggacgatttttatggtctggggatgatctctgcccgttactatcagcagaaattcagccgccatacgcacgaaggcttttgtattggtgtgattgacgaaggtgttcagcagtttttccgtaccggcagtaatcattatgccccgaccggcgatatcatcctggtgaattccgatgaaatccacaccggttcctcggcactggaaaccggctgggcctaccgcgcgatttatccgacaccggaaatgctggatacgctgatgcaggatctcaaatcggctgaccagggctttgttccctggttttctcacgcagtggtgcatgatcccggccttgccgcacagttacgcctgctgtttgatgtattgctgaagccggataaccggctgctgaaaggctcactgttgctctcaaccctggcctggcttatcacccgtcacaataaaaaaggctttcgcccggcggagatcaccccggccggtcagcgcctgcagcatatcgcagagatgatgaacagccatccggaaaccgattattccctggatgaactggccgcaatggcgaatctcagcccgtggtattttctgcgccagttccgtctgcgttacggcatgccgccccacgcgtggctgattcaggcacgtctgcgcaaagcgcgtcagctgttgcaaaacggcggcagcccggcagatgtctctttacagtgcggatttaccgaccaaagccactttacccgccattttaaacgggcaatgggagtctcaccgggcaaatttatgcagcgccgctgatcccgctgaacaattttgtacaatctttctgttgttgtgtcatggcagagtatccggactgttttacgctgtacggatgataacaatgacaacaaccacagatttacccgcctctccgctgaaagatttcctcaccggcgcactgcatatgaccccgcttaacctggccgtggtgccgtgggcgatcctcgccggatcgatggcggtggacagcggcctgacctttgcacaaagtgtcgcgatgtccgcgatggtctttgccggtgctgcccaactggtaacactcggcctgcttaacagcggcgcaggggtgatcaccattatcgtgtccgtcttttttatcacctcacaacacctgctgtacgggctgaccctgcgcccgcatgtgcgccctttttccccgctgcagcgggccggtatcggttttctgctgacggatgaactgtttgctgtcagtgtcgccgggcggcagcgactgagttttgcgtatctgttcggcgcaggactgagtttttacctggtctgggtgctggtcagtattctcggcattgtgctggcacacagcatcagcgacctgagccagctccggctcgacttttcggtggtggcgacattgctggcgattgtggtgccgctgatcaaatcaaaaagtgcactcgccggggccctgttttcctttgtgatcacgattattctgacccgcgccggtgtacagggcagcgcggtgattgccggggtcagcgccatgctgctggccgttctgctggggcgtaaatggggggatgtaaaatgagctggggattaatattcgcactgacactgatgctgttttcgctgcgctttatttttctgatcccgagattaccgctgcggcttccggtctttattcagcaggccctgacctattccgcgccctgtctgctggtggctatttgcgcgccgattgtattactggaggaacaacagttccgtgatatcagtgataatccgtatttatggggtacgctgttctgtattatcgccgcacggctgattaaaaataccctgctgactgtggtcctgacgctggtatttttctacactctgatttatctgttctgattatttaactgtccgcaccggaaacccggtgcggaattcagagaacgttacggtttttcatgaatttcttttgccagcaccggcaaaatatcaatcgagcgcggtcccggcactaattcagacagattcactttaatataatttttatttttcacggcttttacaccctgcatttccggcatggactcaataaatgccactttctggtcataatcatcatcattacggaagcctttatagacaggaataatgatcacttccggatcagacataatcacatcttcccagttaccgaccgcccaggtttttccggtatttttgccggcaaaaatattcttaacagaaatcagtttcagcatctcagaggtatagccatcaaagaaggtatagggtttaccgtcctgagaatcaaaaataaaggcggttttttccggatacgcctgaatctggctgataacggtattcagtttttctttttctgccgccacgtatttttcagccgtctcctgcacaccgaagatctcaccaaatttcagcatgtcgttaaaataggtattcacatctgctttcggtgatgtcatggattccggcacataaacggcaaccccttccggcacaattttattggcttccagtgccagttttgagaatgagtttgcccagccggtggcgaaatcgggtttgacagacataaagacttcgtaagacggccatttttctgccaatacaggaattttgtcatatgctgcttttaccggcggataaatcggctcttccagaaaagcggtaccgaccatacggtcccccaaatccagtgccagcagcatttcggtggtgatctggctgagagagacaatacgctgcggggatgtttccggtttaaagtgatattcgttgccatccagttttgcactgaattcaaccggaacataagccggtgctgttttattttccgcagtggctgtcacggaaaacaatgcagagataaccagggtacctaataataattttttcatcatttcctcatccggattataaaaatatagcaacacggtcttcgaccggtaataccgtaaattccacaccaaatacatcaaacaggcactcccgggttaatacttccgccggggtgccctgcgcataaatttgcccgtcattcatcaggatcagatgctgacagtattttgcggataaattaatatcgtgaatggtcataattacggtggattctgatgcggccagcgctttcattacttccactttatagcggatatccaggtggttggtcggttcatccaggatcataatatcggtttcctgggaaaaacatttcgccagcatcacccgctgtttctcaccaccggacagtgcgtgatactctttatttttcattttctgcagaccaaacaatgccatgtagttgtctgcaatcacgaaatcccggtcgctgtaatccacgtaatgttttttgtacggcatccgccccatcactacaatttcctcaatggtcagtttgccttccacctggtcattaaactgcgtcagtaccgagatattgcgggcgagtgatttgacagaaaactgagccacatccgtgttatcaaagaaaacggtgccccgggttttgatatcccggtaaatatgccgtaataaagtcgttttaccggagccgttaggcccgacaataccgatcacccttttaccggaaaatgacagattaatgtctttcagtatcccgttataattcaggtcattaatatcaacagtactcacgttaccggctcctgttcgctttaataatgatataaacaaacagcggtgcgcctatcagtgaggtcagaataccgaccggaatctcttccggtttaaaccagctgcgggaaatcgtatcaataatcaccagaaatgcaccaccgaccaggcaggaatagagcgataacttaaagtgcttcactgaaatcgtattacggacaatatgcggaataataagaccgataaacgcaatcacaccgacattggccacaataatagagaccacaaaggatgataaaataatcaccgccagtttgatggctccgacatttatacctaattgtgctgatgcatccgcacctaacaataacgtatcaagcacattgctgaataacagacaaaaaattaatactgcaattaatgccaccagcggcagcgggatataagaccatttaataccggagaaactgcccagcatccagaacatcgcgcttttaacctgactttcattcttggacagataaataatggcagtagtgatagcagaaaacagactggaaataccgataccaatcagcaccagattggtcatattactctttttgaaattaaacaggacaataatagccgtggaaatcagcccgcctgcaaatgcaccgatatagacattatacggtgacataaaagcaaataatccgagcacaatggcggataccgcccccgcgctggccccggaggaaaccccgagaatatacgggtcggccagttcattgcgggttatggtctgcatcaggatccccaccagcgacagggatgcgccggtaattgccaccaggataatccggggcagacggatattataaatgatggtttcatacggccggagatcatcaccgctgatgcccccgctaataattttgattaccgtatccagcttctgatgaaattccatattgacgctgccgtaaaacagtgaaaaaaacatggcagcaagcaacacagacaggcagataaaaaattgtgacaaattccggccattcagtttctttttacgccgcacgggtgtttctcttactgcttcactcatcactgttaacctgtatttcatcagatcagaggctgttaacagatttacggaaatatcacattatgataacgaaataccgccataatttgcctgtcagtctctgtttccactatttttctgattatagcggagaatacatcacggttatgtactcccccagagtatattccgggaaataatctgtaaatatccatatttaatgatctgtatctgattagcacagaataaaacgccggaagatttcccggcgttttatttatctgaacagcactattttaccgcatcaaaattattctgccggataactgtaatattatcgttgatctgatggcgtaatgtttgtgcaaacagggtcttatcatcttcactcattttctgtgcatgcagcgcgaaaaaactgtccggatcatcaaatatcccgaaatcctgcacaataccgtcacgctggatataggtgtcgttatcgccgttccactccaccggtgcttcctgcaaggaatcaatagcgataccaaacccggtgaaacgcccttcaaattcctgataatggttttgtaatgcctgtaaatacggcatatccaggatcaatccctcgaaattaaaccagttatcctcaatctgtgcctcaacccaggtgtgagagatttcctgcggcatcatggcgtaaagcttaccgttcataatgcctttctgcagtgatttatcgatagtaaaaccgtgcagacggcacggaataccgacaccgcgtaataacgccataaacagaatggatttggtattacactgtccgtagccgtcctgcaaaattgcggatgcggtcagatagtcatcggtattaaacccgaaacggatgtcatcacggcagaaatcatatatcgctttcatttgctcacgcggtggcagtgtccgccagcggcgctctgtaatcagtgtctgaatgttatctgcattaaaattcagcagcggggtcgggttcagccagtttttcatatttattctcctcatcaatggataaggctgactttatctgaccactcacggcgaaactttcagaaatcggctgacctgccgggcaaaacgcggctgaataccggtcagtgtccggcagactgcggataaatgagacggtgaatcaaaacccgcatccagtgccgctgcggtggcggtatcaccctgagcaatagcagacagtgcacggatcaggcgctgaaacagaatgtaccctttcagggtgccgccggtggtatcagagaacagatgtgacagccggctgcgcgataaataaatgtccgccagcagatcgctgtcctgcaacggcagcggtgacggtgaacgcagtgctgtgatcaccgccctgatccgcgcatcactgatttcatgcggctgataacaccctgttaccccaagtgccgcagtcagtttctgccacaagtgccggtattctttttctcccggtgatgtcaggccggtaaacgcggtgatatccggcaacataccggtgatttgcgcagaaagtgacctcgcctgcgggaaatcatccgtcagcagaagatgacgcaggcaaaccgccatcggcgatgtatgatcgataaggatcagccagagcggccggttgccgctgattatctgatgcggtacacggctgttaatcagcaccgcgctggtgttgtacgtctctccgctgataatccactctcccggtaaaccgtccggcgcaataatcagatgcagaaaatcatgccggtgaggccgggcatccggtgccgtcccgaacagagagaggtgatcgggcatcacaaacagtgttttttccatcatgccctccgctgcggctgaagtggttctctgaaattttaaaaaaccggctcttttctcatcccgttcagcatattacagtacaggaaagcaaaacagcgcggagagagaataaatgagtcagataaatgcattcggacaaactgtcggtgatatcgttccggactggaccgcccgcccttaccctgcccgtatcagtgcggaaggccgtcactgccggatcgatccgctgagcccgtcccatgcggatgacctgtaccgggcattttcactcgcccctgacgggcgttactggacctggctgccggatgaaccaccggccgatctgaatgaataccgcgcccgtaccgaaaaaaatgcacaatcgtcggatccgctgtttttcacgattacggataagcacaccggcaaagccgttggtctgttttccctgatgcggactgatgagaaaaacggcgtcaccgaagtcggtcatgtgcatttttccccgctgctcagcggcacggtgatgtcaacagaagcccactggctgctgatgaaatatgtgtttgataccctcggttaccgccgttatgaatggaaatgcgacagcctcaatgccccctcccgcaatgcggcactgcgcctgggttttcagtatgaaggctgtttccgtcaggcgcgggttgtcaaaggccgcacccgtgacaccgaatggttttccattactgaccgtgaatggccgttagtcaaccgcgccctggaactgtggctgtcagacgataattttacaccggacggcaaacagatccgttccctggcatccctgcgtgatgcagtatgaaaatgattgatatcggccgtgtcgcagaactgaccggcctgacaaccgccactatccgctattatgaaagcaaaggcctgatcacgcctgccggacgcaggggcctgacccgcatttatgatgaagaggtgctgacccggctgtccctgatcattctcgccaaacagggacatttttcactggatgaaatcgcggtaatgctcagcgaactgccgtcaaaagggattgaacggacggcaattcaggcaaaaatcacagaaattgaccagaaaatccgcgagctgcaaaatctgaaacagggattgctgcatattgagcagtgcccggcagaaaaccatctggcgtgtccgaagttccgcaaaatcctgagtgtcagcctgaaaaaaaacagaagcaaagcggtgaaaaatcccgcttgacttaaagttaacttgaagttgtatcatccggcatactgatttccgtctgatgtcattattcactttttctgttgaataataaggaattattatgccgcgttctgtttactggctctctgccgccttagccttatttaccaccgggaatgccctggtgctttccgttgccgttcttatcgggtcacaactggcagaggacccggcacatgccacgatcccgctgctggcacaatatatcggcctgatttccgcctcggtgccgatggctcactttatgatgcgcttcggccgtcgcgccgggtttattctcggtaatatcggcgggctggccggggcattactggcaatcgccggtatttatacacacaacatgctgctgttttccgccgggactttctttaccggtattgccatcggtaccgcccagcaataccgctttgccgcactggaggaagcccctgccgcgctgcgggcaaaagctatcggcgtggtgatgagcggcgggattatcgccgtgctgatcggtccgtcactggcgatgtccacccggacactggtggcggcttatccgttcctcggcacgttcggcgcgctgacggctatctatctgatggcttttgttctgctgacatttttaccgctgaaagctcagcttcccgctcaggtcagcgatactgtaaaaaaccgcccgtcccggcagttatatccccagccgctgctgattctgatcgccgtggtcagtgctgccggctataccctggtagtctatatggtcggcgcgttcccgctggcgatgaaagcgcagggatttgaattcccggcaatcgcctttgtgtttcagtgtcatatcctgggaatgtttgcgccctctttctttaccggacagttaatcagccgggtcggggtaaaatgctttgtctggctgggagtgatttgcctgttaatcagcaatgcggtcagtctgaccggcagtagttacgcgcactttctcattgccatgacttcgctgggactggcgtggaactttattctgatcagcaccacccatctgttgccgcgcacttataccggcaatgaacgggctaaaatccagggtgcaaccgattttcttatcttcagtttcggggcgctcggcagcctgctggccgggttcgccttctattatgcgggctggtattccgtgaatgtcgccgggctggcaaccggtattatgattctgatagtgatgtttttactgcgccacagtatgaatgaatccccggcagaaaaggccgccgcctgaatacatcaccgccgctgccttaacgacagcggcggatatcattactgcaccgccgaggttttatactcaatgccgtcacggtttcctgtcaggctattgctgtagtgactctcctgaaaatagaacaggcgattgcgccatttatcaaataaaacggtttccccgtactctttcgccaatggtgctgctgtattccagttcagcccgccatcatccgatatccgggtttctgaacctgactccactatcaggaaatcataacggccgccatgcagtccgttaatataagatccgccggtttccagcgtctgggaatattcgccgttacagttaaggtggttaacttccggccgtttacggattttttccgtcagtacaaaataaatatctccgccggtggtactgtcgagcgcgtcaatctccccggggacaacctgatcagattccgtttctgaggtcagggtattaaaacaggccagtatggtgttttccggatcattttgttcatccttcatccatgcgatcacccgcccgtctccgttatagtgccatttagtggtactcaggctggtataccagcgtccgtcatcctgataccgttttttccggttatccatgctgaataaaggtcgccagtgttttccggaatcacgggtctgatacagtgtgttcctctgcaccatcagcacactgccgggttctgtgatagcgagaatctgagtccctccggcgggttccggcattgtccactgtgataaccattgccactgctgaccaccgtcccgggagtaaaagacatattctttgccgtaggaggcataatcactgaaaataatcaggcagcgtccctgcatatcacacagctggctttgtacctgccccataaacatcgcgctgacccgtaaatcccctttctgctcagtcataatataggtgaccggcaccagcggcctgtcgccgtagacttcactgcgcctcaggtaataggtttgtttgtgcaggtaatcgccgatggcttttttatccggggatattttcaggttcagcagcggaatatcaggctcttctgccgggttaaaagcaatatttttactgtggctgcaactgcgtgttttctgatcacaggtaacgagatcaacccgcatagcgtctctggcaccggttatcatcacaccatcgcggaaactgctgatagccagtgacgttaattttatcgcttctttttccggcagataactgcgggtgcgtattctctccggcgctgaaaaaaatggatcagaaaacatcagcatcactgaggagataaacacaaccgccagcaacgtgatccgggtacgtccgtcagcaaacatcagttaacttcctgtacaaacggatcttttccgttccgttgtctggcctgagccagcatctggcgggtgaacacaaaacggaccgaggccgctgagtattttcgtgtcagcaatgcaattacttcaattatcagcatgaggccactgaaaatcatgataaacatcatcatgccaacacccagcgattttgccgcattccgccagtcccatttatccggtgtaccgctgacactcatcagatcattgatttcgatagataaaatcatcagcagcatcaccacaaaagtaccggcaaacacggtatagatcattttcaggtgccgtgatgacaccaccatcccttccggtttgaggtaagcactgtggtcgcgctcattgtacatcccgataatcgttcctttctgctgattcacggtcagcgccaccggatcattatccgcaataaagagcggatggcggcggaaaaacagcgggttcatatcttcagtgaggctgttgtaataactgcgcagaacaaacggaagccccccgcataaaaattgatattcgatataatcccgccggcttttaccgctgccggtgaatccgcggaaagaacccaggtttgatacttttccctgaacgccggtcagcgtcagttcttccgcatagcggtaatcttccggctgcacagaatccagctcattaaaacggtcatctgcaggccagcgccgcttatgtttcacattcacgaatgcgtccgtcagcagatattccgcctgacggcagacagccgtattcccggccttcacctgtgtcagccctttcagaaggtgattccttgcacggctgtttgcgaccatcaacccctgaaccgcgatggccagcatccagatcccgccggtaaagacaaagatcatcaatacaccgataaacgcattgtttaacggctgaaaaaacgtgctgacagagaaaatcatcagtaccagtgcaatcaccagatttctcagcccccgcagattaccggagctcttcatttccggctccagattgccgtgttccggtgataccagccagtgcagccagtaactgccgccggccagcggccgggcaccgatatatatcctgtcaccttctttcagttttttcagcactgcatcatcgctgaactgagaggtaaaggtatagaacaccttatcgcccgcgataatccggcggtaattgtgctccggcggtgcattgcagtcctggcggacaaatggcaaatcaaaaaaacagacttttttcataacggaatgagtgcccggtaatcactggtaaattaacctgagtttatcgtttcagtgcatcgcggaaaaccgtacagaccgcaattccgtgtctgaagcctgtttttaaggtatttctcagtgtttcaggttagtgtcggggggaaaccgctaaggagaaacgatgtctgaattacgtaatgccaaaaataatgtttatgatgatcctgttttctttgaaaactaccgtcgtctgcgtcagaacgataccggtctgaacggcattctggaaatacctgcgctgcgcgcgttgcttccctgtctgaaacataaacaggtacttgacctgggcagtggattcggcgattttgcacgttatgccagacaaaacggcgcggcatccgttaccggcatagaattgtcggaaaaaatgctcacagaagcacagaaactgacaaatgatcagcatatctgctacctgcacggttcaatgacctgtttacccgctgagctgaaaaattttgatattattgtttcttctctggccattcattacattgctgacttcaccgcactggcaaacgacatatatacaaggttgcagcccggcggatattttgttttctctgtggaacatccgatgtgtactgctttttcttcctcatatcaaaaagatgaacatggccggtttgtctgcatgccggtggataattatcaggatgaatcccgccgtctgacacactggtttgtggacgatgtggtgaaatatcaccgcacagtgcaaagctatgtcactgcactgctggatgcgggttttgaactccgcgccttacaggaaccgaaaattccgcagaagtggctggacgttcgtcccgaagcagacatatttaaccgttatgcgccgtttttattgctcagcgccggcaaacacagtgcaaggacagataattaatgaccacacagtatgatgacccgctataccgcgaccctgaactggcgcagttttatgatatggataataaatggcgggccgattttgatatgtatcttgcccagtcggccactgccggacggattttggatctgggctgtggtaccggtacgctgatgaccgccattgcggaaaaatacccggataaaattctgcccggagcagatccggccgccgccatgctggctatcgcacagaaaaaaaccggccgcgtcagctggctgcaggcatccgcagaaacccttgatgccggaatgacttatgatctgattatcttatccggccatgcattccaggtttttctgaccagggagcagcgtattgctgcattacagaatatacagcgtcatttaagcccggacggcattgtgctgtttgacagccgcaatccggctgctgaggagtggcgggagtggatcccggcactgagccgggaagtgcagcgcagtgataaattcggcgatgtgatatcctggaatgatgtatcagagcataacggcattgtccgttatcagaccttttatcagatcggggaaaacggcccggtttaccgtgcagaatcggatattgcgttcccttccgctgcggaaatcacggaagccgtgacattcagcgggctgatggttcgtcatatttacggcgaccatcagtccggcccgttcaggccggattcacgggaaatggtatttgaactgagtcacccgcagtgcagtcaggcctgcgcagcctgatcacgctgacggtaccaggtatttttcaccatataatcaaaataccgttctgtactgatgtgaacaaactgcagcggcgacggcagcgtgccgaataacggcgtgccgcctcccagcaataccggtaccgtggtgatcaccatttcgtcgatcagatcggcagccagacactgttttgctgccgttccgccgtcaatatacaggttgtgatacccggcacggtgaatatctgccagcacatcaccaatctctccctgaacaggatataccgccttacccgccagtttttccggtaattccgtcactgtacgggacagcacaaaaaccggtttgtcatacggccattccccgtcaaacgcacagacagtatcaaaggttttccgtcccatcaccacagcatcaatccgctgcataaaggcagaaaatcccatatcgtcctgctccgggttcggcacggcaaagagccagtccagtttgtcctgcgcatcggcaatatagccgtccaggctggtggcgatataaataatatgacgcatagtgaataccttaatgacggattaacagaacagtgtattattgtgctttgcattaattctacgttgtagaatatgtttacacagcttagcgggctgatatggttaacgtcaaccggcaaagacaaaacatgattaaaaaatcattaaaaacaggcgaaaaatatgatcggacaaacaagcgcagaaaagcaaacggtgctggtcaccggagcaaccggccaggtgggaacgctgctgatacagtgcctgcgcgaacgcggaaatgtgaatattattttggctgcccgtgatccgaaaaagcttgcagactgcggcctgccggtgcgttatttcgattatgatgatccggcatcactgttaccggcactgcacggcgtggatacggtttttatgatgaccggctacaccctcgccatgcttgaacagagcaaagtctttattgatgaggcacgtaaatccggtgtccgccatattgttcatctcggcgcctgcggcgacgataatacccgtgtcgcgcactgggcatggcatcagctgattgaacgctatattgagtgggcgggatttgattacacacatctgcgtccggaatcctatatgcagaatctgctcggctatcagggggataatcagcatccggcgggggtactgagtgattatttcggtaatgccacgctgagctgggtgtcctgcgaggatgtcgcggaagtcgctgccgcttgtttatccgtccctgcagagcaccgtaaccgggtgtaccgtttgggctatgatgcgaaaaactatcacgaaattgcagcgattatcagcgaaatcaccggcattgattaccggtatgaagcattatcaccagaggtattccgtgagtttgcgcaaaaacaggggctggatccggcgtatatgaaaagtatttatgatcattatatcgccttcagtgaattccggatcccgggcgccggcaccacttttgataatttcacggcaatcaccggaaaacaaccgatgtccgtgaccggttttatccgtaaataccgccatcgtttccgctgacagaggcaacctatgacatcatcccgactaccgccctgcggacgccccactcaccggggcagtaagctgacagcagaaaatattctgtccgaagccggaaaactgttacaggaacagggaaaagtaccgtcgatccgcacccttgccgcacagttgcaggtcgatccgatggcgatttattattacttccgcaataaacaggcattgctggaagccctctccaccgccctggtggatgatatttatcagccatcggcacaggctccggtacaacaggagcttcagcggctggcagaaagttatctgcatctgctctatatttacagtgatctgctggatattctgttatcactgaacagtgacggcccgtccggctgtttccgccagcgttatctgcgcattattgcgccctgcgggctgagtgagtcacggcagaccgctattctgcatctgctggcggatgccctgcacggccatacggtggcgatccgcgggactgattacacctttgaacagagccgggcgctgtttcagccggtactggcattaattaccgaacttattgaacgccacggagcatcattatcatgaatatccgccctgttaccggtttacccggcgatttaccgctgctggaaagcattgctcaggttttacatcaggaatggcaggaactgccgcagtggcagacaccggaaattatcctggcacgtctgataaagcggatgaacggtgataacggtgaaatgctgtttgtcgccacggataaaaacggcgctctgtcggggacggccagcctgatctggcgggagctgaaaacctgccgcatggcaaatgcagactggtggacaggcgagatttacaccctgcccgctgcccgcggacaaggtctcggcagtgcactgacacaggcagtctttgccgccgccggagagcgccgcctggccgcactgaatctctacacgccggataaacaggccatgtatgcacggatgggctggcaggctatgtatgatgatgtgatcaatgacgagctggtcacggtaatgcagcggactgtcagcgaagcgtgattcagggcttcagcgcctttctcagcaagacacgtaacccgcagagaaacgcctcccggctgaactcaggttccgtcagttcccgccccagcgtgccgtccgccatcaccagcagccaggacgcggtttgtgccggatccagctgcgggtcaatctcaccggcagccatgccgcgtctgagcacatcacagaattttttgtgcagccgttgctcattaacaacaaaagccgtattcagctcagggttacggcttgcctcggtgataatctccaggctgaggcgggtataacccggctcgttatacaacataatcaatgctgttatcattttttcaatgatatctgccgtatgtcccggcgcatcaccgatactcagaatcgccttatggtcatcctcgtccagttccgcaatcgcttcaatgatggcgtatttagtcggatagtaatgaaacagattcccggggctcatcccggcggctttacaaatctccgccgtcgaggtggaatgaaaacctttttcgataaaacaatgcattgcagcgtcaaggatctgacgacgtttgcgctgctgcttttccgttaatttttccataaggaagtgtctccgaaaaaccggataatagaaattagactgattactctatctattataataccacattttctgtattgaagattatgacaaacataataaaaaacagtacatctgctactgataacagcagattaatcaccgaatgtctggatgaaaccgggttagagcctgccactgccctgttttatcaggcattttcatccaaattcaaaacggtcagcaccatgccggatgcacagcgtcaggccgtgctggcgatgttctggcagcgcgggctcagtgacccgtatgaccgccactttcaggtaaaacgtaatggcagactggtcgccgtatatggcctgacttacggggttaaacacccgccgcagcacgccccggcaccggtttcttctctggctatcctgcgcagggccggttttattccctttatgaaaatccgccggatttttcagatgtttgtccatattccggcggcggatacggcttatctgtcctacctgtgtgtggatgaatcactgcgcggtaccgggataggcaatcagattcttgatgagatcaccacgcaattacgggcggaccccgccattaaccggttatcgctgtatgtctctgacttaaatataaaagccagagagctgtacctgcgccggggttttcaggatgtgaaatacgaaacctcacgcaccacagaacgctatatggatatttacggctggtattacatggccttacccacactataatgagctgattatgtttattctgccttgcgaacatttaccgcacaccgccacctggatggcgttcggcgcggacccggccatctggtccgcttctctcgcggaaaaagtctgccgcgatcaggccgcacttgcgttagcgattgcccgctttgagcaggtcaatctgctggttacccgtaaaaacaaaaagctggcacagcaactgatgggtgacactgtcacttatatcgaatgcccgctggatgacatctggctgcgcgacagcggggcaaattttgtatatgacaccacaaccaaacgccctgctgccgtcagctttaattttaacggctggggcggaaaacaaccggcaaaacgggattcacaggtggctgccgtgatggcggattacaccggtttaccgctgcatatcagcccgctgacactggaaggcggtgctgttgaggtaaacggaagcggcaccggtatttttacccgcagtgccattctcaatgataaccgtaatccggggatgagccgtcagcggacagagcaattgttatcgcactatctcgggctgaaaaccattatctggctgaatgggatccgtaatcatgatattactgatgcacatattgatttttatgcccggtttgtcagtgaaaaatcactgattattgcgatggaaaataatccgcagtcgtttgagtatgatgtcacccgtgaccatgcagctgccctgcagacgctgaagcagcataccaacctgattgatgagatacatatcctcagtaatccgctggttacgcgggtaaaccgcgaaaaaaacccggactttgccgccggttatattaattactatccctgcaacggcgggataattgtgccggaattcggggacgccgccgcagatgaacacgcggtacagttgctggcatcactgtatccggggcgaaccgtggttcaggtcaatattgacggaattgcctccggcggcggcgggatccactgcgtgaccatgcagcaaccggattttacttcttttactaccgacggacagatacatgacaccgattaactggcagactgccgccctgcacgacctctccccgcagacactctaccgcctgctggcactgcgcagcgcggtatttgtggttgaacagacctgctgttatctcgacccggacggcgccgacctcacggcactgcacgtttgggcggaacaggacggtgaaatcatggcctgctgccgtattcttccgccggaaaacagcacggcaccggcagccatcggccgggtggggatcaatccgcaattccgtgggcaaaaccggggctatccgctgatggctgccgccgttcaggcggtataccggcatttcgggacacggcgcattgttatcagtgcacaggcacatctgaccgctttctataaaaaatgcggctttaccgtctgttctgacgtttatgatgaggacggaattccgcattgtgatatgttccgcccgccactgttgctgtcggctcaggaacggcaggatgtgatgatctttgcagagagtgacccggatgaaaacccgtgggttgccggaaaaccccgtacgacagagattacggtcagtgaatatgatcccgcctggcccgccgtttatgcgcaggaaaagcagcgcattctggatgttctgggtggtaaagcactgcatatcgaacatgtcggctcgactgcggttcccgggctggccgccaaaccggtgattgatatcgatttgattgttgccgacccggccgatgaagctgcatggcttcctgccctgatcgccctcgggtatgaacatacggtccgtgagccctcgtggtatcagcaccggatgctgaaacgggatcaaccgcaggtcaatctgcatgtatttgccccgcgctgcccggagcatctgcgtcatattctgttccgcgactggctgataacccatccggacgatctcgcagcttacgcacaaagtaaaatgacggcaaaagacggtgtcagtaacaccatggattacaaccggaaaaaatacgacaccgtacagcagatttatgcccggctgtttgccgcattgccgtaaaacaaaccttaaggccgtttaagctccgccattgtctgttattcacaggcaatggtatgatgctcacatccatcaactcaaaaaataaataaggaggctaattatggtgttaagttatgtgattgaattctcacatttctttggtaatcgtcagaactcaggcttttctgttaacgctgtgcgttaatcctgcctgagtgaagctttactgaatttaacatccttcctcagcttacagggttatcgcgttttatgacccatggcattgttatgcctgaaatttgagtaagctatgagcacattattatcaacccgtaatctgtcattccatcccggtcacacaccactgttaaccgatatttctgtcgccctgaatcagggagaaaaaatcggtctgattggtcataacggttgcgggaaaagtaccctgatgaagctgttgtccggccagctgacaccggatgaaggcaccattaccccggctaaccgcgtcattatggcgtatatcgagcaacatctgccggaatccctcaataccctgtcactggcggatgccgtgctggagaaattaccggcagaacaacatctgtccgaaatgtggcgggcagaaatgctgctgacagagatggggtttgacccggtacagtggcagttaccggtcaccgccctgagcggcggccagcatacccggctgttactggcacgggcgctgatcagtcagccggatttgttattgctggatgaaccgagcaaccatctggatctgccgaccattttgtggctcgagcagttcctgaaaaactggcgcggcagttttatcctggtttctcacgacaacgccctgctggatcacgtcaccaactgcacctgggtgctgcgggacggtaacgtttcagtgttccgtctgccctgcacgcaggcgcgggaggcactggcgcaacaggatgaaagtgatgagcaccgccacaatgcgcagcagaaagagatcgaccgcattgcggtaagtgccaaacggctggcgatatgggggaaggtgtatgataacgaagccctttcccgcaaagccaaacagatggaaaaacagatagaccggttacaggatgaccaggttgagctggcgatcggcagtcagtggcagctgaagctgaccggagatgctctgcgggcagaccggttgtgcgcctttaatcagttatctgtgatcccggcagacaattgtccgccgctgtatgtgacagacaatgtatcggtgaaatccggcgaccgcattgccgttatgggcgcaaacggtaccgggaaatcctcactgctgcggatgatctggtcacagtcgcagaaagcggaagtaacactgccagacagcccgctggtgctgcatccccgtgtacatctggggtattacgaccagaaactggcgcaactgaatgacagtgattcactgatggatgcactgaaaccatttgcgccactgattgatgagcagcggaaaatggcactgatcagcgccggtttcccgtatctgcgccatcagcagacggtgtctgccctgagcggcggtgaacgggcgcggctgttgtttgtcggactgagcctggccaactattccctgctgatgctggatgaaccgaccaaccacctggatatggacggaaaactggcactggcagaggaaatcagccggtttgaaggcgggctgattctggtcagtcacgaccgcgaactgatcgaaaaaagctgtaaccgcttttggtatatcgacggtaaccggctgacggaatatcacgatctggatcaggtctatgatgcaatccgtgccctgaatgcagattccggcagcggcaacagcgtgttaccggcagctccggagccatctgctccggccagtgatgaagaagattcgctggcggcactgattatgctggaggaaaaactggcggcggatttgcagcgcaaacccgcacatcagaaaccggcactgcaacaacagtggcgcgaacagattgcgcaactgcgggatgagctggggctgtaatacgccattataaatgcaggccgttacttttttgtaacggcctttttaattcatcttttaagtccgttcgcttccagccacccctctgtgaccttgccggtcgccggatgtatataacggccatgaacaaatccctgatacggctgaggacgatccacccagaccgcatcgtctttcaccacaaaatccgcagcaccggtaatacagcccttatccggagcatcataaaaacgcaggcgattttgtgtcacactgtatttgtatgaggacggtttactgtttttcaggtccgcctgatactgtttgtccgcgttcccggttgccgcatcgcacagtgagtcctgtgacgccagccggttaacattaatccagccctgcgcattgccgtaagccaccagcagccagccctctttttcccctttcaccggttccgtagtccgcaatccgaccacctgaaggacatcccccggaaccacaaagacattatcattacggcactgttccgccggtgctgcataaaaataagcccggcctttgccggtgacgcgccactccggcgacatggcaataaagggttcgtagcggagcgtactgaggatctgctgacacgttttctcttttttcagacaggattgcagccgttcaccctgcgctgcgctgaaggtcagcgggacgggatgctccacatcggcccctgtcgctgtcagggtattttctttgatattgtaagtcacccagcccagttgccctgctcccggcgattccggcgagggcttttgccgtgtatcagaaagctgaatcgccagctcattgatatcccggttttcaatataaatccccagcctgtccgcagtgacctttcccgcacggacaagcccgtgattactgcctgcaatcagctttatcagctcactgtcacagtcaaacaacgggccggtcgctgtcgcaggaattgttgcgtcattatccataatgacctcctccgttgccggtgcggcggcagccatcaccggcaaaacagcaaagaataaactgctcagtaacattgttgtgcgaaaacctgttgtccgaaaaacatctgtgcgaaaacgcatccgtatcccttatattcttaaccgatttcctgctgcaatgcctcgcgctgcaacagacgttttttccgttcgatcccccagcggtaacccgcgagttccccgccggttctcaccacccggtgacacgggatagccacagccaggcagtttgccgcacaggcaccggccaccgctctgaccgctttcggggagccgatccgctccgcaatctcccggtaactggcggtcgtacccgccgggatggactgcaatgcctgccagacccggcgctggaatgcagttccccggatatccagcggtaaatcaagcccggaagacggtgcttccacaaatccgatcacccgggagaccacctgttcaaactgtgcgtcgccgccgaccagttccgcattgggaaactgatcctgcaaatcccgtaacagtgcttccgcatcatcccccagcagaatggcacaaatgcctttttcactctgcgccaccaggatgtcccccagcgcacatatcgccagagcaaagaaaatccgcgcccctttgccgcctgcccgccagctttttggcgtcataccgagcagtgtatccgacgattcataaaaccggctgccggaactgaagccggattcagcgattgcgccggtgattgtcgtctgttttgtcagttgttcccgcagtttatccccgcgataggcttttgcccatgccgccggtgtcagtccggtatgtgagcggaaaatacggtgaaaatgaaactgactcacgccgcacagtgtggccagctctgccagtgacggcagcggctcaccattatcgatccgggtttccagctcgcggcaggccagcaccacctgttccgcatgacgctgcgtcatggcctcaccgctgcgctgacggcgtttcccggcacggtagccgtgggcctccgcctcttccggcgtggcaaaaaattcagtattttcccgtttcggcagccgtacaacggtagacggaaatccccatgtctgtgtggttttcaccgcatacacaaacagcgtatcggctgttttatctctggcggccagcgctgcccagcacgcatcgtctgagagtattgtctgttttgtcatcctgtttctccgttaccgcgcgcagcggaaggtcagattaaaccgccgggcacccgcaagcggatgcaccccggcccttaccggacggacagcatggtaattcagacgggaacggccgccccacaccagtacatcaccgtgttcaagcgcaaaggttttcaggggatgatgccgctcactgccgccgaactgaaactgcaccggcagaccgagtgaaaatgacacaatcggctggcggcgatccggctcatccctgtcctgatgcagagacataccggcgcccggtgcataacagttaatcagacagctgtccggcaaaaatccgtgaaacccggcccgctccgcagccagctgcgacagcaacaaaaatgcgtccggcagcggcggccacggattgccggtcagcggatctgtttgtgagtagcggtaacctttggcatcggagatccagccgtatatgccgcagctgctcatggccgcagacatccggtatccgccgggcgtctgcatatggcggaacggcgaaatggcggtcaggcggcgtatttccgccagcagcatctcatcctcatcactgagaaaacctttaagcagatacgcatcgggtgccactgcaagcggttcatcgtgagcaaagagatctgacataacgcctccgtcctgtttcctgtgtctttccggtgatgacagtattgcaggccggatacagacaaacactccggctcttgcttttcaattctgaggcacagtataaagcggcggacagtcaggatgaagtgttctgttcctgtttcagacggcgccataacgtggtgcggctgatccccagccagtcggcagcagcacggcgatccccccggaaacgggctaccgcttctgttgccgtggcggtattcaccggctccggcgggagatcggtcacaggggcgggagcaatcaccgtgcgccgttcaggagagagtttcagtaataatgattctgtaataattttatccggataagcactgcaatacagcgccacccgttccatcagattacgcagctcgcgggcatttcccggccagcggtaatgatagaaaaaatcactgcatgccagaatctgctgcagatggccgcgatgcagcggcagatccagctcagcaaacgccagtttgagcagtttttctgtcagtaacaggatatccgccccacggtcacgcagtgccggaagctgcagacgcagtacccccagccggtaaaacagatcggcacggaatgtccctgccgccacccggttatccagatcattgtgagtcgcacaaatcacccgcacatccacggtgatcggtttatagccgccgatacgcacaatggcgcggtcttccagcacccgcagcaggcgggtttgcagcgataccggcatttcaccgatttcatccagaaacagtgtgccgccgtccgccgcctcaaataacccggcacggccgccgcgccgcgaaccggtaaatgcgccctcctcataaccaaagagttccgcttccagcaggctctccgggatagccccgcagttcaccgccacaaacggtgcagcgcgtttcatccgcttatgtttatgaaacaacgtatattcatgatgaatagcttgtgccgccatctctttaccggttccgctttccccctggatcatcactgtcgctttcgagcgcccgaacagcgtgatggtttcacgtacctgttccatcaccggcgaggtgccgagaatatcattcagcgtatggcggacattcagcgagcccgccaccggcagcggcatgttctgcggctggtcgcggatgcgcgtcagttctattgcatcggtgaatgcccggcggactgcatcattggaataaatgaaaatgcaggtcatgccgcactctgcggcgatatcggtgattaatccggctcccaccaccacagaaataccgtccgctttcagagcgagacaggctgcccgtgcatcttcggcggtcacataactgcgttgttcaatctgcatgccgaaactctgtgccagcgagtccagtgccggaaaagtattacggtaataaatgaggccgatgcgctgactgagctgccgtgcccgcgccaaagcctgcatgatatcgaacccgcccggcgcagcgacaatcaccggcaccggcagatgttgtttcagatacgcaccgttagagcctgcactgacaatcgcatcacagcgttctgttttcagccgttcacgaatcgcctccaccgcggcatcgaaccccagattaatcgcactgatattggcacgggcactgaattccggactgatatcacggaacagggtaaaaaggcgtgaaatggagaccgtccagatcaccggtttgtcattctgagccatgcgtttctccctgtttcaggcgtttcaaatgtttcatattgattccatgaaacacattaacagctattttgaaacataaatagcatcaccatcacagaaagccaacatcctgcttgtcagacggaatcggcaaattctatagtgggtaacgtaatgacaggataaatacgccaaatgtgtgatgtatctcgcgttttagttaccttacccggctgattggcatagtgattgctttataacatctgagtatcaaactaataacaaggtgaatatatggcactttattccgcaggacgcgcattccgcgacgctgtacagtctgaatccccgctgcagctggtcggtgctattaatgccaaccatgcactgctggcaaaacgtgcgggttacaaagcgatttatctctccggcggcggtgttgccgcaggctctctggggatccctgacctgggcatttccacgctggatgatgtactgacggatgtccgccgtattacagatgtgtgtgatctgccgctgctggtggatgcggatatcggtttcggcccgtcagcctttaacgtggtgcgtaccgtgaagtccctgatcaaagccggggctgccgggatgcacattgaagaccaggtcggcgcaaaacgctgtggtcaccgcccgaacaaagaaatcgtctcaaaacaagaaatggttgatcgcattaaagccgcggttgatgcacggactgatgagaatttcgtggtgatggcgcgtaccgatgcgctggcagtggaaggtctggaatccgccctcgaccgcgcacaggcttatatcgatgccggtgcggatatgctgttcccggaagcgattacagagctggcaatgtatcgtctgttcaccgacaaaatcagcgttccggtactggcaaacattaccgagttcggtaaaacaccgctgtttaccctggatgagctgcgcagcgtgaatatcgctatcgccctgtacccgctcaccgccttccgcgccatgaacaaggccgctgaaaatgtctataacaccctgcgccgtgaaggcacgcaacagagcctgatttcacagatgcagacccgtgatgaattataccaaagcattaactactacgattatgaagataagctcgacgcactgttttcgcagaaaaaataacctctgaaagataacgcgaagcaggttgtacactcactataataataaggatcacccgtcatgaatgaacaacttagcaaacctgaacctgcactgaagaaaggcaaaaaatccgtcgcactgtccggcgttgctgccggcaatactgcactctgtactgtggggattaacgggaacgacctgcattaccgcggttatgacattctggatttagccacacaatgtgattttgaagaagtcgctcatcttctgatccatgaaaaactgccgaacgccgcagaactggccgcttacaaggcaaaactgaaatcactgcgcggcctgccgcacagtgtgaagaaagccctggaagcactgcctgcctctgctcacccgatggatgtgctgcgtaccggcgtgtccattatgggatgcgttctgccggaaaaagagggtcatccgttatccggtgcccgtgatatcgccgatcgcctgctctcttctctgacctccatgctgctttactggtatcactatgcgtttaatgatcgccgcattgataccgaaaccgatgacgatacctgcggcggccatttcctgcatctgctgcacggcaaaaaaccgtctgaaaactgggtgcgttttatgaactcctcgttcattctctatgcagaacatgagtttaacgcctccacctttgctgcccgtgttatcgccggaaccggaacggatttttactcctccatcaccggggcgattgccgcactgcgcggaccaaaacacggcggtgccaacgaagtgtctctggagatccagaaacgttacagctcaccggatgaagctcaggccgatattctcgcccgcctcacccgcagtgaagtcgtgatgggcttcggtcaccctgtgtataccattgctgacccgcgtcaccaggttatcaaagcgatttcccgtgagttatccgaagaagcgaaagatttccgcctgtttgatattgcagatcgtattgaatccgtgatgtctcagcacaagaagatgttcccgaacctcgactggttctcagcggtggcgtatcacctgatgggtgtgccgaccgccatgtttaccccgatttttgttattgcccgttccgcaggctgggctgcacacatcattgaacagcgtctggataataaaattattcgtccgtccgccaattacaccggaccggaaaaccagaccttcgtaccccttaaagcgcgctaattattgattaaaaaggaagataaagtatgtcagcatcttttaccccgcagcatcaagagtacgacaaggtcattcaggacatcactgattatgttctgaatatggacatcagcagtgatcgcgcttatgacaccgcatattactgcttcctggataccctgggttgcggtctggaagccctggaatatccggcgtgtaagaaaatgctcggccctgtcgtgccgggaaccattgtcccgaacggcgccaaagtaccgggtacccaatttcagctggatccggttcaggcagccttcaatatcggtgccatgatccgctggctcgatttcaacgatacctggctggcggcggaatggggtcatccgtccgataacctcggcggtatcctggccgttgcagactggttatcccgtgaagcgattgccaaaggcaaagcaccgctgccgctgaaacgcgtgctgaccgccatgatcaaagcccatgaaattcagggctgcctggcactggaaaactcatttaacaaagtcggccttgaccacgttgtactggtgaaagtcgcctccaccgccgttgtcggtgaaatgctggggctggatcgtgagcagttattaagtgcggtttctcatgcatgggtggacggtcagtctctgcggacctaccgccatgcgccgaataccggttcacgtaaatcctgggctgccggtgatgccacttcccgcgcagtgcgtctggcgctgttcgcacagaaaggtgaaatgggctatccgactgtcctgactgccaaaacctggggattctatgacgtgctgtttgacggcaaaccgtttaaattccagcgcgattacggctcttatgtgatggaaaacgtgctgttcaagatttcattcccggcagagttccactctcagaccgccgtcgaggcagcaatgacactgcatcacaaactggcggcactgggtaaaactgcagatgatattgagaaagtcactatccgcacccatgaggcctgtatccgtattatcgataaacacggcccgctgaataacccggctgaccgtgaccactgtatccagtatatggtggcggttccgctgatcttcggtcgcctgactgcggcggattatgaagacgggatcgcgtcagacagccgtatcgatgccctgcgtgcccgtattcactgtgaggaagatactgcgttcacccgtgattaccatgatccggaaaaacgctctatcgccaacgccctgaccgtaaccctgaaagacggtaccgtgctggatgaggttgtggtcgaatatccggtcgggcacgcccgccgccgtgaggaaggtattccgctgctgctggcgaaattccgtaccaatctggcgcgtatgttcccggaaacgcagcagcagcgcattctgaatgctgcccgtgaccgtaaaacactcgaatccatgtcagtcagcgagtttatggatctgtttgttatttaatttctctgcccggcaacgcagaaaaacgaagcggatactcaggtatccgctttctgttttatctggctttaaatattattcagcctgaaacatcgccataatatcctgctcagtcagcatcggtgttttttccgcaaaattgtaatacgccggtttactgtcggtgtaaatctgcattgagaggcgggattctgttgtctctcccagcaatgccgcagagacataatactgatctgccggtttcagataataaaacaggtgtgtgccgcactcgcggcagaaacaacggtcgccccactctgaggagtgataacgggtgatatattcctcaccactgagcgtaacatcactgccgcaatccacggacataaacggtgcgccattccattttctacacatgccgcaatggcagacagaaacatcgtgcaccggttttggcacagatactgttactttaccgcacaaacattgaccctgaaccattttctgtctcctgtatataatcaggttgttattgattaacttcagtgtttttccgtgatgaaaactgaaaaacggaatctgtaacccgctttctgtcatgcagacacgatacactatcaggatattaccaccggtattatatcgccatggttattgttattttttccggggatccccgctgacagaatcggagtatgtgatgattgttttaattacaggtgcaacagcaggttttggtgaggcatttgcccgcaaatttattgagaacggccataccgttatcggcaccggtcgccgtattgagcgcctggcaaaactgcaaaaagagttcggaagcaaatttttcccgctggctctggatatgacagacagcccggcggtcgataatgtgattaattcactgcctgaatccctgcgcgaaattgatgttctggtcaataacgccggactggcgctgggtatggaaaccgttgataaaggcaatccggcagaatgggatgtggtggtggacaccaacatcaaagggctgctgcatatgacccgtgcaatcctgccggggatggtggaaagaaaccgcggccatatcattaatttaggctcaaccgccgggtcatggccgtatgccggaggtaacgtttactgcggaaccaaggcgtttgtccgtcagttcagcctggcactgcgcgcagatctggccggtaaaaaaatccgtgtgactgacattgaaccgggcatggtcggtggtaccgagttctccggtatccgctatcgcggggatgaggaaaaagccgcaaatacctataaaaatactgatccgctgatgccggatgatatcgcggaagcggttttctgggttgcaacattgccgtcgcacgtaaatattaatactatggaaatgatgccggtctgtcagtcattcgccgggctgagtgtgcaccgcgaaggctgaaaccaccacaaaagataagccggtatccgtataatcaggtaattttcttaaattacctgaaattatcgctgaaaaacgttgtcttttattggtgcattaatacactttgctataatgctcacgatcagaatgacgtttgcaggtttgaactttgaggaaaacacgacaatgactaactccatgctcaaaaagtggtttatcgcgaccgcctttgctgcacctttcatgtttgcagctcatgcaggcgcggccaccaccaattgcagccccggcagcacttgtgtgatcagcggcggcgatactgcgcttgaaaaagagagagcacgccaggaaaaagagcaatgggatgatacccgttccctgcgtcagaagatcaaccgccgtgcggaaaaagagttcgacaaagttgaccgagctattgatgctgaagatgcatgtttaaaaagctcggttgttaccgcgtattgggaacctaatacgctgcgctgccttgatgcaaatacagggcgtgaagtttccactggctggaaataaatacatttaaggataaataatgaaaaaactgattgcgctcagtgctgttctgtttgccgtttcgcctgttatggcgcaggcatcctgtgaaagtgtgactgaggaaatttcgcagaaaatcatcagcaatggtgttcctgctgacggttttacactgactgtggttccggctgaagaagcggcacaggcagaaggtcaggttgtgggtaactgcaacaacgaaactcagaatattatttatctgcgtaaataatatctcgctgtcaggttttgaccatgaaaaagggctgatttatcagcccttttgtatttcttaccggagactcaggacgccgctaacgcctcaccccagagcatctcaatctgctcttcattgagatagtgcgacaactcccgctcttccggacgcagcagatacgggatttcacccagcagtggtgccggtaaatgcgtcagtaagcgatccataacctgtgcgtagtgtgataagcccgggtttatccggttcgcaatccagccgataatttccagaccatcatttttaatggcttcggcggttaataatgcatggttcacacaaccggactggatcccgaccaccaggatcaccggcagtttttcctttttcacccaatcagacaaaaaagtctcgttattcagtaaataacgccatccgccgttcccttccaccacgacctgatccgccagatgacttaatttttccagacccagcgataatgcaggaaactgaacgtcggtcgtcgtctgaccgtaattactttccagcatgaccgggttgatatcctgataagaaacatcaactgatgatgaatcatgcaggatcatcgcgtcacggttacgtttgccgttaagtgtgtcgtggtattctgtcgcgattggtttatagccaacgacagatttacccaggcggttgatggcttgcattaaagcccgcgtcgcaacagttttgccgatattcgtatctgtgccggttataaacaagcgccttaacatagatgtttttccgttatatcaagaggtgcgtatcaaaattgataacggaagcagtgtaagacatccggtttatatcaggcttgcgccagcgcaattttttgcgaaaatcctgttttcatgaacaaatccctgtcatttatttgttttatgtcaaagatagacactacagaattatttaaccatccatcagccggataagaagtgagccgttatacagcgcctctttgattaacgccgcgccgggtaatgtaccgcaattagtaaattcacatgaagtcattgtcagctcccgggtgaaagccggcaaggcacgctgcgtaatccgggcgcggatggcaggaaacagaacagaggatgccgggtttaatggtgagccaatcaggataatctccggattaaagatattgaccatcacggcggcaatatccccgatatgctgccccacctgctctatcagctcacgggcggcggaattaccgtccagtgccgcgcggcataacatttcagcggtcagcggttgtccttccggaacgaccaggaaccgcgctgccgtttccagtacatgatgcagcccaatttcagtttccagacagccgtgattaccgcagtagcagggttttccctgcgggtttatctgtgtgtgaccgatttccgccgtgctgtgactgccggcatgcagcagtgcaccgtcggtaataacggcagcaccgacattttcatcaatcaccagttggataatattccggcactctttcgccgcaccaaaaaaatattccgccagagaccaggccgaaataccatgctggaggaacaccggcatcccggtatgctgataaagaatctccgctaccgataaatcggtcagctgatagtacggggaatggcggatgataccgtttgcagggtcaacaatggcatcggtggtgatggcaatagccgtaaggcgctcggttatccggtgattacgggaaaagaaggcatcaacctgtgccagaaacagggtgacaaaatcccggttatccgcctgaaatgcaataatatcttcggccagtaattttccgctcagttcccgcagcgcaaaaaccaattccccccggttaatgcggatacataaaaaatgccagccgtcacaatccgttttcagccccactgccgggcggccgcgaaaacctaatcccggaaactcggtttcccggaccagatgcgcatccatcagctcacgggtaattttggtgatacttgccggtgccagctgtgcttttttcgagagtgaaatgcgggaaatggggccttcacgatcaatataacggtacacaacccccatattggtttgttttatatggtcaatatgtccgggctgtgctgaaggtttcaccaataataatcctgtgcagatgatgctaagatgttaattatccgaataaatacgcgcttagtaagtggcttcacacagaactgtgaaatgattcacagtcagggggcaaaagccgaacgataaaccacaattcctgttttattttgcagatatgtccgtaatggtgaatcaatgacctgttgttcattccgttttgatgaggcattacgtaaaaacagcccgtccggggtgcggataataaccccggcatgcgagacatccaggccgggacggtcagaatagataccgatataatcaccggtctgcaattgtgaaagcacagcgggtgtcagcacggaaaccggcagccaggcgatatcccgctccgtaaccggaatatccgggatataacgggagccgttttttttctgattcagcatcttgtgtgtcacccggtaatccggcgacagttgccgggtgatatcctgtgccacaggctgcgggccgcttacccaatctgacaaaaaatgacggcgctgatagtaattcacctctccgtttttataacggatgtgcatcagcctgttgcggaaatcctgctgctgcggactgcgtttcagtgcttcggtgtaatcgagaaaagtaaaacagtcgagcgcgttcaggtcagccaccagaatttccggtgatccgggagagcctatcagctgaccggcgcggtaaggtacgccgagaaactgcccggtcagtgcagtaatattgtcaggcgcaattttgcgtgagccatccggctgatagaaatggctgagcgatacccctgctcccgcggcgcctgtatataaaagaaaaagaaatgcggtaataacagaaaaccggtatcgccggaacatccgaactcctgacagtcagatcccgctcagcggaacacattatttttcagcatctcaatcagccgctgaccggccggagaaagtgtattgtgcttatgatacaccagccagacctcagaaaatgcctgattttcagctaaatgaatgtaacggacaccatccactttcatacgggtaaaagattctgttaccagtgaaacacctaacccggcagagaccagccccagaatagtcatggcttcccccgcttcctgagcgataaccggtgtgacacccgcttttttcagcagattgataatttcatcatacagcgccgttcccacatcccgctcaaagaaaaccaatggtacgccagtgagcatctccaggggaatacccgttttgaggtatttcatcagcggatggtcatcatagaccgccagcataaatcgttctttaaacagtaattcgtgaaccagattatccggcagttgcgtgttgcgcatgacaccgaagtcaatccggccgctcagcagcgggttaatctgctgtttggtattcatctgatgcatgtggatagccacatccgggtatatttcacggtactggcggaatgtcgccgtaatatgacgcataaacggggttgtggaagtgaagccgacagaaacttcccccagttccccgcgatccattctggctgctttttcaaccgctgcctcgacctgagtacggatttggtaagcttcacgcagaaacatttcgcccgccggggtcagactgacattccggttgttccgtgccagtaatttagccggaatcgcgttttcaagtgcctgaatctgctgactgagcggaggctgggagatattgagacgctccgctgcccgaccgaaatgcagctcttcagcgaccgcgataaaataacgcagatggcggaattcgatcattattccctcattaggtcgtaaaacatatcaaacaagagtattaatatattagacaaaataccagcatctttttatgctcggtattattaccaaatactgagataagtgtatgacagacgagaataaactgataactgacaaccgtgtggcctcaccgatgcagaatgatcaggcaaagcagcactatatccagcgcgacgacaaactgtatctgcgtgtcaccctctctttctttatggttggtctggcgacgtttgctctgctctattttgtacagccgatcctgccgttgttatcagacgatttttcggtatcaccggcgcaggccagtttgtccctttctctggcaaccggattcatggccgtcgggctgctgatcaccggcccgctgtcagatgcggtaggacgtaaaaatgtgatggtgatatccctgacctgcgcggcaatctttaccctgctcagtgcgtttaccaccagctgggtggggatcctggttgtccgttccctcgtcggcttgtcactcagcggtgttgccgctgtggccatgacctacctcagtgaagaaattcatcccagttatgttgccctgtctatggggctgtatatcagcggtaactctatcggcgggatgagcggacgcctgatcacaggcgttattgcggattatgccagctggcggattgccgttctggtgctgggaacattttctctgttcggtgctttcctgttctggcggttactgccgccgtcacgccatttcagagccagttcgctgaaaccgaaaagtttgtggaaatacctgatcctgcactgccgtgatgatggtctgccgtggctgtttgccatcggttttatcattatgggcagttttgtcactctgtttaactatatcggctaccggctgatggagtcgccgtatcacttcagccaggcagttgtcggtatgttatcggttgtatatctgtcaggaacttacagtgcctcaaaagcaggtgcactgacacggaaatacggctacggcagagtactgattggtgcagtcacattaatgctgaccgggattctcattacactcggcagttcactggcagcagttctgatcggcatgctggtactgacgacgggattttttgccgcccattccgtcaccagcagttgggtcggacgccgcgcccggcgagccagagcacaggcatcctcactctatctgttttgttattacggcggttccagcattgccggtactctgggtggtgttttctggtcttactggcactggaacggaatcggctggtttattgccgctatgctggcaaccggtgtactgattgctctgtatctgaataagcacgctcactcatagtacataactaatacagtcaggtaattaatagtgatgtcatataaaatacctcatcgggttaattgccggtcagcttacagatatgtaatctgcatatattccgcataataaatattcttaacccgctaaaagacaaatgaggttttatgatagcacttatattgagcagtacactcgtgttcagcaatctgtatcagtgtgatattaattaccctgagtcctgtgatatctggccgcctgtcggattaacagaaataacggagtaaatatttactgcgtaacaagcaccatggtattagtatcttcatatctataatttcctgtattgatttatttatatttttagcaccaccaatgaaaaacgcattggtggtgttttttaattacctgctgacaaatatgataaaaataacaagaataacaatcacgtctttatatatcttacaaggaaaatacctaattcggttaattaccaccaggcagactttacgctaatgttatcaggccagacacactctcattcaccacaacagacgtatacgaggttaatatgctgacactgatactgagcacttccctgtttacatatgatttttttcctcccagagacccgaaactgacgcagtcaccacaaccaaaagaagaattggttatatacagagaacatacctgctcgctgtctaatccattttgctgaaatccgatacccggcagataatatattcattcctgataaactgaggtaactatgctgacacttttattaaccggaatcttattattctcatcagtggattcatttgagtcttgtgatattgttgcaccagaatattgtccggttatatggggtcattaaaaatacaacgccttaaatgatggcagatatacgcaagtatcttacttttataaatcatgtaaggagtctttatgctgacacttattttaagtagctcattgatgatccacagttgctttcctaaacctaatgcagatgaaataccaccaccggtcctttgggaaccagcagaaatccactctgtttatgataactgcccaaagactaaggcttattgcagcaaaatataaaaatacagctgtattttattatcccatactaatgatgagcaatcatttttacgcacattaaccgtaaagggataatacgacgttgatatacacccacaaactttgccgttaacccacgatgctgtgggttaacggtgaaaactaccatatgttcctgacgcttcagcccctcccctcgtgccagacaaaatgtatttgtacaaagcacgatgctgagttaatgtgatataaacatatatgtatgttgtaactaaaatggtgatatatgcgatacgatgcaacgatttctcttaccgactgctttcatcagctggaatcggcactgaatacattatgcaatgctatccggctgcacctttcccgaactgctgaggtttaccaacttcctgagatactgaaaggagaggaaaataacaccgtcaacaccatttctgtcattccggtcagtggcgaagatgcggtttccctggcactgtcccactatcaacgtttgtttatcttcgataatgatcaggaaatcagcagcaaatctgccatccggttgcctggtgtactgctcattacactcttccctgcacaacgaaaaataatgcagcaacagcttgatgaggttaaccggttgaaacagcaactggcctcaatcgtgacagaaacctccggtgtggacaaaacacagcgttttgaattcgtacacaatcagataaaaggattgattacgctcaatgcctaccggcagatccagtcagtcacctccccttcctcagtccggtttggctgggccaataaacatattattcagaaggtggatcgcgatacattgttatctcagttggaagaacaatatcagaacccgcgcgccattcagtctctgacgcgtgaagaacggcaggtttatctggcgaaagagatttccgccttaaaacaggtgccggaagacgccatactcaaaatcaaacgaccggtaaaagtccagccaatcgccagagtctggtacagcgaagcgcaaaagcaggtgcagtatgcctgtgcatcgccgctgattgtattttgtgatgagaatgaggaaaagccggtaacgggcgtactaccggattatgatgcggaaaacatcaaaatacggcacagaccaaaagcaaagaaattaattcccgtgataccacgactgcatttatatatggaagtgatgtaaaaacggagccatcagcggctccgttatcatgattcctggctgcggattacttcatgctgccgaccatatcttccggacgtacccatgcatcaaattcagcttctgtcagataacctaatttcatggcagaggctttcagggtcagaccttctttatgggcttttttcgcaatttcagcggctttgtcgtaaccgatatgcgtattcagcgctgtaaccagcatcagtgattcattcagcaactggctgatacgctcgcggttcggttcgattccgaccgcacagtgctcattgaagctgcgcataccatcagccagcaggcggacagattgcaggaagttgtggattaccatcgggcggaacacgttcagttcaaagttacccgatgccccgccgatattaaccgccacatcattacccattacctgagcacacagcattgtcatggcttcacattgtgtcgggttcactttacccggcatgatagagctgcccggctcgttttccggaatggcaatttcaccgatgccgcaacgcggaccggatgccagccagcggacatcattggcgattttcatcagtgaggctgccagccctttcagtgcgccatgggcatgaaccagtgcatcacaggtggccagagcctcaaatttattcggtgccgtcacaaacggctgaccggataattcagcaattttcttcgccacgcgaacagcatattcaggatgagtattgagaccggtaccgaccgcagtacccccgagtgcaagctcactcagatgcggcaggctgttttccagatgtttcaggttatattgcagcattgccgcccagccggaaatttcctggcccagtgtcagcggtgtcgcatcctgtaagtgggtacggccgattttcacgatatcacggtaagcttccgctttcgcggccagaacactgtacagggatttcagttcagggatcagctgtgtgctgaccgcaatcactgcagcgacatgcatcgctgtcgggaatacgtcgttagagctctggcttttgttcacatcatcattcggatgaacaatacgttcgccgccgcgctgcccgccgaggatttcactggcacggtttgccagcacctcattcatattcatattactttgtgtgccggagccggtctgccagattgccagcggaaactcttccggatgtttaccggcaagcacttcatccgctgcggcgatcaccgcatccgcccgctctttcgccagcagtcccagatcacagttgacagctgccgctgctttttttgtaatggccagcgcagcaatcagatccgcaggcattttttcaactgaaatacggaaatgctctaaagagcgctgggtctgagcgccccataatttgtccgcaggaacatcgatagggcccattgagtctttttcaatacgcgtggctgccattagtctctccttagcacacaaaataaaatggatttaaaatcccgaaagttacagatagactctgaaaacgggcctatcttgccatactttcatttccgattatgcgatccgggcggagttattgctttattgttactatcttattgttaactgtttaaaaagagagcgttgctatgttaaaaatgcagaatcaggtgcaattctatgattggggaagccataccgcgatgacagaaatgtacggttacccgaaccctgacaagcagccgatggccgaattatggatgggggcccatccgaaagccagttcggtggtgacagacacccgcggcaacacctgctctttgtatgattttattgccggtgacccgcagtccgcgctcggggatgaaattaaccaccgttttcaccggttgccgtttctgtttaaagtgctgagtgctgctcagccgctgtcggtacaggttcatccggataaagccgctgcagaggaaggatttgcccgcgaaaacaacgccgggatcccgctggattcaccagttcgtaattataaggatgataaccataagccggaactggtttatgccctcaccccgttccgtgcaatgaatgcgttccgtccgctggccgatattgccggactgctcagtgaagtcgctccggcacatcctgctattgaacgttttattgcctcgccgtcagaggagcacctgtccgttctgtttacccgcctgctctccatgagcggggacaccaaagaacgggctgtcgctgtgctgaaatctgcactgaacagccgtcagggcgaaccgtgggataccatccgtaagatgacagagttttatcctgacgataatggccttttcaccccacttctgctcaatgttgttgaattaaagcccggtgaggcaatgttcctgtatgcccgcacacctcatgcgtatcttgaaggaactgcgctggaagtcatggctaactcggataatgtgttacgcgccggtctgacacaaaaacatattgatgtcggtgaattgctgaataaccttgattttgtaccgaaacacgcaaaaagtttatttatgcagccggaacatattaacaacactgaaattttcccgattccggttgatgatttctctttttcagtgatgaaattgcaaaatcaggaaatgattcttgagaataacagtgctaatattcttttttgtgtggaaggtcatgcagttatcactacagaaacagaacaattaagagttatctcaggtgaatctgtttttctttctgctatagaaagaaagtttaaaatagatggtgaaggaatcattgcccgcgtttataatgctgtgtaagtaacttctctaattttctccgggcagtccgccattgaactgcccgttaattttgataccgtgcgaaaacctgcaaaataaatcgcatataaaggatggatttatctatgaaaaagtcgttagttgctgttggcgttattgtcgcattaggcgccgcatggggtgtggcttcatggcagactggtaagaaaattgaagcaaaccttgatgagtatatcgccaaagcgaataaagcaatcaaggataactaccctgatgcacctgtcacgctgaccgccaaagatttttcacgcggtattttcagctctgatgtcaaactgatcatcaaagaaacgaaaaaaagcggtgatacctccggcgaagaacttgtgatcctcaataccatcgatcacggcccgttcccgttatctcagcttaagagcatggtgttctcgccaaatatggctgctatccactctgagctggaaaacaatgacatcaccaaacaagccttcgaaatcaccggtggtaaatcccctgttgcaacggatacccgtatcagctacgaccagagtttcgatattgatcttgctgtcagcaaaatcaactataagaaagacggtgaagagctggcattctccggtgctgatctgaacgttaaattcgacaaagaattcaaaaacgtcaaaggtaaaggcagcagcaatgaactgacttaccgtaaaggcgatcgcgaaagtatcgtgatgaaaggcctgtcatttgacagcgatgttgccaaatccggtgacagctacttctatctgggtgaccagaatctgagcctgaaagagttagcggttgttaattacagcgataccgtttctctgaaagatctgaaactgaacggcacctccggcagcaaagataacaaactgactgcagatgttgattacagcctgggttcactgagctaccgtgatatcgatctcggcggtatcagcctgaaaggttctctgaaagatctggatgccacttccgcaaatacgctgatggcatctgttgaagagtacaccaagctgtctgagtctatgtacaccgaagatttcgacgatgcgaaaatggaagcactggatgagaaaatgaaatccaatgcactgggtctgttcaagtacagcccgtccttcgctatcgcacctctgagctggaaaaacagcggcggtgagtcaaaagttaacctgaacgtaacgttcaacgcgctgaacgaagaaagctttaaagccctggaacacgcaggcagctttgagaaagttctgccggttctggtgaaagagttcgggttcaatatggatctgtcaaagccgatgctgactgatttcgttgcagttgccatgcagtcacagggtatgggcgcgaaagaagccaaagaacagggtgaacagggtgttgctcagatggccagcatgggtgccatgatggaaatcgtgaaagtgaccgataaagcgatcaccatggatctgaaatacagcaacaacaacatcgatttcaacggtaaaaaattcaccgttgctgaattcctggaaaaatatgaccagtacggcgcactgagcgataacagcggtgacgacgaaggttacgaggaagaagcaatcgaaatggatcctaacggtgatgttactgaagacgtgactatcggtgaagaaccggctgctgacgttgcggctcctgctgctcagtaatttcacactgttattatctgttgatcagacaaaagccagtcgtcagactggctttttatcatctgaggaataccacaatgattaaccgctcacttcccctgaccgacctgcaccgccatctcgatggtaatatccgcctgtccaccattctggatctggcccgtcagcacaatttgccgctgcccgcttatgaggcagaggcattgcgcccgcatgtgcaggtaatgagcaatgaaccggatctggtgcagtttctgagtaagctggactggggtgtttccgtgctggcagacctcgatgcctgccgccgtgtggccgctgaaaacgtgcaggatgccgtcagtgccggactggattacgccgaactgcgcttttccccttattatatggcgatgaaacaccatctgcccgttgaaggcgtggtggaagcggtactggatggtgtggcgtccgaagtccgcaacagcccggtacggattaatatgattggtattctgagccggacattcggtacagatgcctgtcatgaagaactgaatgccctgctcgctcaccatgagcggattgtggcgctggatattgccggtgatgaatccggttatcccggcgatttattcaccgatcatttccgcaaagcccgtgatgtcaactgggccattaccgcccatgccggagaagccgccggcgccgccagtatctggcaggctatccgcgacctgggtgcacagcgcatcggtcacggtgtgatggcgattgaagacccggcgctgatggattacctggcagagcaccgcatcggtatggaatcctgcctgacctcgaatattcagaccagcaccgtgccgtcactggccgcgcatccgctgaaacagtttctggcacacggcattgccgccaccatcaacaccgatgacccggcggttgagggtattgagattgcccatgaatacaatgttgctgcaccggcagccggtctgactcaggcagaaattgaacaggctcagattaacggactggaaattgcctttttatccgcagaggaaaaagcggcactgagagaaatggcagcaaaacgcggccagtaagcgccgttccggtacaaaaaagccgtggcattctgtgtcacggcttttttatgtcttttaccagctcccggaagctccgccaccaccactgctgccgcctccgccgccggacgatccgctgctcccggagctaccgccggaactgctgctgtaactgccactatcagaaccggatgaatacccgcctcctgtacctgctatgacaccggttaatttccgtatttccgcttcctgagtaagatattccggaattaatgtatataacaaataacaaataaatagtgagccaaatacattaagaaaaatgagcatcattatactgatgaacaacgcatcaggatcaggatctccgtctatcagaacccgtgtcattataaaaatcagaactgaataaaataatacgttcacagtatggccgagcggtgtcggataaatatacttatactgcaaaaatgccgtcaggcgtttctgcgcaaggcggattatccgttcaggctgacgttttttcttgtttttggatttcgcgtattcttctctcagatattcaatatcgttaagaacctgcttttctatccttttcttacggcggggagaaccaataaataatgaccagagatacaccgtaataaaggtcagaagataaataatcgccagtcgtttgagttttaatgcttctgttccggatgtctctgacttgatatattccggctcatttccgctgataatatcaatggcatcggtcacacccgcttcaattccggtaaaataatgaccttttttaaattcaggggtgatgcgctgacggataatacggcctgcggagacatccggcagaataccttccagtccatagccgacctcaaaacgcaaattacggtcattcaccgccacgaccagcaacagtccgttattctgatctttgcggccgatcttccatgtattaaacgcacggtgcgcaaatgtctcaatactttctccgccggttgacggcacaataaacaccacgaactgactgccgtcattgtggctcagttcatactcaatgagttgccggttaagctgtgtaaattgcggaccgctcagaagaccggcgctgtcaataacccggtcccgtttcagttccggcagagcctgcacatccgcacgggcgaaaaaactgacaaaaagaagtatcaggcatcctgccataaccctgctcataattactcctgtgaatgttctttcccctgccgcgcatagcgcgccgccatcaccgcacacaccatcagctggatctgatgaaacagcatcagcggcagcaccaaaatccccaccacagcaggcgggaacattacgtttgccatcggcacgccgtttgccaggcttttctttgaaccacagaacacaatggtaatttcatcggccttattaaagccgagtgcccgtgagccgtacacgttgatcaccagcacaatcgccagcaacccgcacgacaccacggcaatctgcagaatagacattgcatcaatcttctgccagatcccctcagcaaccgcttcgctgaaagcgacatacaccaccagcagaatagaggtgcgatctgttttattaatgatttttttattgcgatccacccacttgccgatcagcggacgggaaaggtgcccgaccacaaacggcagcatcagctgcaataaaatagaccggatagcacccagggtatccagctcatgcgcgccctgcgtttccatcataaaaccgataatgaccggtgataagaacacaccaaggatactggaggcggatgcactgcagattgccgccgccacatttccgcccgcgacagaggtaaaggcgatagccgattgtactgtcgccggtaaggcgcataagtataagaaacccatgtaaatggtcggagacatccattccggtaccagaaactgcaaacccagccccagcagcgggaagaggataaaagtactggagaacaccatcagatgcagacgccagtgccccatccccgtgacaatcgcttcccgcgagagttttgcaccgtggaagaagaacaataacgcaatcgcggcggtggtcagatagcggaatccggtcgccacactaccggttgccggaaagagtgacgccaaaataacaaccgtgatcattatgaccaggaacggatctaaccgcagtttctgccaccagtttgtcatgcgttattcacttttgtctgcaataagaagtaatgattatttgttacagtgtcacagttcgtccggttttatgcgattccataccggcctcaataatacggataatttccgccccttcctgcgcagtcaccgggttcgggccgttattgataaccgcctcagccacttccgcgtaatagcggccatagtgcccggctttattcggatacgtttctgtgatcacttcaataccgtctggtgacaggctcagttccccgtcgcggctgtcatgaccccagttgacaccgaccggcatctgccctgctttcagtgcattttcctgcggatccagtccgtacttcacatagctgcctttcatgccgtgaacgatatacaccggggattctgctgccgcgaccgtggtggcatgcagcacaactttgacatccggatagtgcagttgcgcatggaaataatccaccgcttcagaacccggacggatcatacccagatcggcggtgatcgccgctggtttgccgaaaaactgcagtgcctggtcaatcagatgtgatcccaggtcataccagataccactgcccagtgcggcagcttcacgccagcgtttcagcggctgcgggcggtagcggtcaaagtggacttcaaaatatttgatatccccgagttttttactgtcaaacagggatttgagggtcagatacccggagtcaaaacggcggttatgataaacagacagcaccagcccggcgtcatccgcctgttttgccagggtaaatgcctcttccgatgtcagggtaaagggcttatccaccaccacatgtttacccgctgccagcgccatccgcgccagcgggaaatgggtgtcattcggggtcgggatcacgacgaggtcaatggccgggtcagcaaaaatatcttccggcgtggcgacaacctgcacatccggatagtccgcatgcactttggcggcatcactgctcgcgactttggccagttccatattggcattattgacaataaacggcgcatggaatgtttttccggcaaaaccgtacccgatcaggcccactttcagtattttcgtcatcactccctccgggggattgtcatgttaacggataaaaacatgctttcagaatctgtcatcctcctgaaaagtaccactaactgattccgtgacgcaaatgctgtgcccggttttcatcagttttgccgctttttcattctgatacacacagttatccgccctttcacacaatcccgataaccccggatgcccggggattgctattattcaccccgcttaccggggatcccggttttttatgtgctttatttgtatgtttttaaagactcgctttgggcattgtaatggctgactacttattactttttgtcgggacggtgctggttaacaacttcgtactcgtcaaattcttaggattatgcccctttatgggggtctccaaaaaactggaaaccgcgataggcatggggtttgccaccacatttgtgatgacactcgcctccgtctgctcgtggctgatggatacctttatcctgatcccactggatattctctatctgcgcacactgagctttatcctggtgatcgctgtggtggtgcagttcaccgaaatggtggtgcgtaaaaccagcccggcgctctaccggctgctcgggatcttcctgccgttgatcaccaccaactgtgcggtactcggtgtggcgttgctgaacatcaacctgtcgcataatttcctgcaatccgccgtttacggctttggtgcggcagccggtttctccctggtgatggtgctgtttgccgctatccgtgagcgtctggcaacggcagatgtgccggcgcctttccgcggggcatctgtcgggctggtcactgccggtctgatgtctctggcctttatgggcttcagtggtctggtgaaattctgatgacaatgatttggattgccgttgccgtactcagcatgctgggtctggcattcggtctgatacttgtttcccccccccgccgcttcaaagtggaggaagatcccattgtggataaaattgatgacattctgccgcagagtcagtgcggtcagtgcggttttccgggctgccgcccgtatgcggaatctgttgccaatggcggcgcaataaaccgctgtgcccccggcggcgagcaggtgatgctgaaactggcggatatgctgggtgtggatccgcaaccactcgacggtgacgagtccgtactcaatccggtgcgtaaagtggcctttattcatgaagatcagtgcatcggctgcaccaaatgtattcaggcgtgtccggtggatgcgattatcggtgctacccgtgccatgcataccgtggttgaaaatctctgcaccgggtgtgatttgtgtgtcgcgccctgcccgacagattgtattgagatgatcccggtcgccgtcaccccgcgtaactggaaatgggatttaaacaccattccggtcagaaatattcctgcggataccggcggtactcctgtcaaacctgttcagattgaggcgtcgtaagttttatgttcaatttgctcaactttctgaaaaaagaccgggtatgggattttgacggcggtattcatccgccggagatgaaattacagtccagccggacaccgatgcgggtgtgcccggtaccggaagaactgattattccgctgcagcagcatatcggcaacgaaggtgatgtgctggtcagccccggtgaccatgttctgaaaggccagccgctgacacgcggaaccggccgcagcctgccggtgcatgcctcatcatccggcacggtgactgccgtggagccttgtgtgaccgcgcatccgtccggactgaccgcgccgtgcatccgcatccggactgacggcctggataccccgtatccggcggaaaaaacaacggatttcgcctctctctccaaaacagagctgactgaccgcattcatcaggccgggattgccggtctcggcggtgcgggcttcccgaccgccagcaaactgaaaggcggcggtgatcttatccgcaccctgattatcaatgcggcggaatgtgaaccctatatcacagcggatgatcgtctgatgcaggaacatgccggggaaattctcaccggtatccgtattctgatgcaccttcttgagccggaacaggtgcttatcggcatcgaagacaataaaccggaggcgattgccgcactgcgtgacgttactgccggggaaaaacaaattttcgtgcgggtgatcccgaccaaatacccgtccggcggcgccaaacagctgaccaaaattctcaccggccgcgaagtaccgtccggcggacgctcttctgatatcggcgtgctgatgcagaacgtcggaactgtggttgccatcaagcgcgccattaccgacggcgaaccgctgatccagcgcgtggtaacagtaaccggcgaagcggttgaatcaccgggtaacttctggacacgactcggtacaccggtccgtttcctgctgcaacaggccggtttccgtcctcagcatgaacaaatggttgtgatgggcggcccgctgatgggctttacactgccggatctcgatgtgccggtagtaaaaatctgtaactgcattctggcaccgaccacaaacgagatggaaccggctgcaccggaagaagcctgtatccgctgcagtcactgtgcggatgcctgtccggccggattactgccgcagcagctctactggttcagtaaaggtaatgaacacgaaaaagcagaacagcaccatctgtttgactgcattgaatgcggtgcctgtgcctgggtctgcccgagcaacatcccgctggtacagtattaccgtcaggaaaaagcacaggttattgagatccgcgaagaagcccaacgcgccgcagatgccaaaatccgctttgaagccaaacaggcacgaatggcacgggaaaaagaagcccgtgaagcccgtcataaaagcgcggctgttcaggtggatgagaaagacagtgcggctatcagcgccgcccttgcccgcgtgaaagccaaggacagcagcgcgggaatgactatttccgttaatccgtccgtcttaccggataacagcgccgtgattgctgcccgcgaagcccgtaaagcacaggcccgtgcacgccaggcagagaaagcggctctcgcggctgaaaccacacaaccggcaacagaggcagataccgacccgcgtaaagccgcagtggctgccgcccttgcccgcgccaaagcgaagaaagccgcgcagactgctgaagctccggcagaaactcctcacccagccgcagagacagaagccgatccgcgcaaagccgctgtggctgccgcgattgcccgcgccaaagcgaagaaagctgctcaggctgcggaagttccggcaaaagctgaacaaccggcaccggaaacagagacagatccgcgtaaagccgctgttgctgccgccat

SEQ ID NO: 43 - DNA, 29693 bp, unknown
  Altogen 322075 strain
  misc_feature (1956)..(1976): n is a, c, g, or t
  misc_feature (2037)..(2064): n is a, c, g, or t
tctaccaactgagctaatcgcccgtcgtgatggaggtgcattatagggatctgcgcgtttgagtcaacgctttttcgaaagaaaatgatcgttcgttgtaattttagtcaccctgttctgattatcaccacccgcgcgcagtatgtaagcagaaatcggataaatcgtgatcgccgtcagattcagtgctgcaaaaacgtcctgttttgtcatgtatttttccttctgacacgggaaaaatgactttttcggccttctttcccccttttcattgaggaattatgtctcagtgctaaaatatccccaatcgtatttcttcatccactacgtctggcgcagacgttatgaaaggcattccaatgagtaaagtaaaaacccgtttcgcacccagccctaccggctacctgcatgtgggcggcgcacgtaccgctctgtactcctggctgtacagccgtcacaaccacggtgaatttgtcctgcgtatagaagataccgatcttgaacgctcaactcaggaagctatcgacgccattatggacgggatgaactggctgaatctcggctgggatgaaggtccgtattaccagaccaaacgctttgaccgctacaatcaggtgatcgacaccatgattgaaaacggtacggcttaccgctgctactgttccaaagagcgtctggaagccctgcgtgaaaaacagatggcaaataatgagaagccgcgttacgacggttgctgccgcgatcacgcccataaccataccgcggatgagccgcatgtggtgcgtttccgtaacccgcaggaagggtctgttatttttgacgacaaaatccgcgggccgattgaattcagcaaccaggaactggatgacttaatcatccgccgtactgatggttccccgacctataacttctgtgtggttgtcgatgactgggatatggaaatcacccatgttatccgtggtgaagaccatatcaacaacacaccgcgccagatcaacatcctgaaagccctcggtgcgccggtaccggaatatgcccacgtctccatgatcaacggtgatgacggcaagaaattatccaaacgccatggtgcggtgggtgtgatgcagtaccgcgatgacggctatctgccgcaggcactgctgaactacctggtgcgtctgggctggtctcacggcgatcaggaaatcttcagtattgaagaaatgactgagctgttcaccctggaagccgtcagcaaatctgccagtgcattcaatactgagaaattacagtggctcaaccaccactacattaacagtatgcctgcggaagaagtggctgtttacctgcaatggcatattgagaacgccgggattgatacccgcaacggccctgaactggcagacctggtccgcctgctgggcgaacgctgcaaaacactgaaagaaatggcggaaacctgccgttacttctatgaagactttgacagcttcgatgccgatgccgcgaaaaaacatctgcgccctgttgcccgtcagccgctggaagtggttaaagccaaactggccgcactgaccacctggacaccggaagccgtacacgaagccattcaggcaaccgctgatgaactggaaatcggaatgggtaaagtcggtatgccgttacgtgttgctgtgaccggtgccggtcagtctccgggcctggatgtgaccgtacatgcgattggtcagtcccgctctctggcgcgtatcgatatggcgctggcctttattgctgagcgcgaagcacagtaatcattgtcaacgacctgatacccggccctgtgccgggtatttttttgtcattttactgaattgacggctttttcatcggtcgcacacgaatttcatattaagccgttgacagctcagggaaccttgcctattatgctgcgcgtccggtcgattttatcggggctatagctcagctgggagnnnnnnnnnnnnnnnnnnnnnctttggtgactgataaataccgtgacatccggttttccggggctatagctcagctgggagnnnnnnnnnnnnnnnnnnnnnnnnnnnntcaaaccccggtctctgaccggggtttttcgtttctgctttcctgtcattgcgcagtatacccgccatccaccggataaaaaccgccggtacaaaaacgactgtcatctgataacagaaatgccaccatttttgccacctcttcccgtgttgccatccgtttcatcgggtgactctccgccatcattgcctgtacatcctgcggtaacgccagaatatttggtgtcgccacatagccggggccgaccgcattaatccgcacgccctgttctgcatattccagtgccgccgcgcgggtcagcccgagtactgcgtgcttggcagcggtataaggtgcaatccccgcaataccggtgacgccgttacaggctgataaattcaccactgccccgccgccgcttttgataatggcaggaatagcgaatttcatcccgagaaatgtgccggtcacatctgtatccatcacatcctgccaggcctcaaaatcgtaatcctcaatcttcacgccatgcggcccggtgatcccggcattgtttaccaacccgtgtaaagcaccgaatttatctaacactgtgctcaccattcgcttacaatcgctcagtttacgtacatctgcttcaattgccagcacgctatctcccgtaggatcccactcatttattgccttttgcagatgttccggatttcgcccggtaatcgcaactttagcccctcttttcagtaattcgcgggcaattccttcacctaccccggttgaggcaccggtaaccaggataatcttctgttgaaagtctgtcatagcatcaccttttaattaactttggttaatcaaaagcttaattgattaacttttgttaatcaactttcttttcctgattttgcctttcggctaaactaagggtgaagataaaagggaggtgttatgtcattcaaggaactggaaaatacactgtcattgttacagtgcacattggtagcgcaacggaccatctgctcacctgaaaaggtgacatgggcacagtatgacgtaatggaaatgttgcgccttcagggggatttaaccccgtcggatttaagccagaaactcgggatttcgcgccagaatgtctcgaaatcattacgggcgctgaaaaaacaccagtttgtttcccagtatcagtcggagaccgataaacgggaactggtgacccaactgacacaggaaggtgaagagtttctgtcccgcgcggcgataggacgcacccgcaatgcagaaaaagtatttgcaagtctggatgacgatgaacagcgccagtttcgtatactgagccagaaagtcatcgatgcactgacccgggatcagtgagcgggacgtttaagcggttttatcaggccacttaaaccttcgattttaatcgcaagggtgagttgcatcagctgccccaggcgcccttccgggaaactgtctttacgggcaaaccagagcaggtattcctcgggaaggtcaattaaacggcaacctttgtatttaccaaatggcatagcagtgttagcgacagccactaaatcttctttctccatcatctctcctgatgtgactgaaacggtcttctgcggaagaccgtttttcagccggtctgtcagttcagcagcgcaataaactcatcttcattgatcactttaatacccagctcttccgctttggccagcttggagcctgcagcttccccggcaaccaccagatcggttttcttcgaaacactgccggtgactttcgcccccagagccgtcagacgatctttcgcctcatcacgggtcaggatctgcagtgagccggtcagcacaaccactttacctgcaaacgggttatccagtgccgatgcatccaccgccaccacatccggccagctgataccgacatccccggtcaggtcagtgatcacttcccggttatgctgctcgcggaagaaattgaccacatgcttcgcgacaacctccccgacatcaggaacggctttcagtgcttctgtatccgcctgctgtaaggcatccagggttccgaaatgctctgccagattggccgccgtggcttcgccgacttcgcggatccccagcgcgtaaaggaaacgggcaaatgtagtctgttttgatgccgccagcgcgtcagtcagtttctgtgcggacttcggccccatacgatccagtccggtcagcttaccgggggtcaggcgccacagatccgccggagtcttcacatactccgcatccaccagctggtcgataattttatcccccagcccgtccacatccatggcacggcgcgagacaaagtgtttgagtgcttctttgcgctgtgccccgcaaatcagaccgccggtacagcgggcaaccgcctcgccttccacccgctcaatatctgacccgcacaccgggcaactgagcggaaattcaatgtcccgcgcatccgccggacgctctgattccaccacgcccaccacctgcgggatcacatccccggcacggcggataaccacggtatcgccgattttcaggccgagacggctgatttcatccgcattatgcagtgtggcattactgaccgtcacaccggccaccagcaccggctccaggcgggcaaccggggtaatcgcaccggtacggccgacctggaattccacatcacggacaacggtcatctgttcctgggccgggaatttaaaggcagttgcccagcgcggggcgcgggatacaaaacccagcgcctcctgctgtgcaatggaatccactttgatcaccacaccgtcaatatcaaaacccagcaccggacggctctcttccacattgtgatagaaatccagtaccgcctgactgccggtgcagcgcattacacgatcactgaccggtaagccccaggctttaaattgctgcagacgatcatagtgactgcccggcaatgtaccgccttccagcacgcccacaccgtaacagaaaaaggtcagcgggcgtttggctgtcaccgacggatccagctggcgcagtgaaccggctgcggcgttacgcgggttggcaaacactttgcccccggtgcggcgcgcttcctcattcatcgcctcaaagcctttctgcggcataaagacttcgccgcggatctcaatacgctgcgggatattttccccgcgcagtttcagcgggatagcgcggatggtccgcacattggcagtgatgttttccccggtggtaccgtcaccccgggtcgctgcctgcaccagactgccgttttcatacagcagactgaccgccagaccgtcgagttttaactcacagcagaatgtcagatcctgcgtgtctttcaggcggtcacgtacgcgtttgtcaaaggcaagatagctctcctcatcaaacacgttatcgagtgacagcatcgggatctcatggcgtacctgttcaaatgcactcagcggtgatgccccgacccgctgtgtcggggagtccggtgtgataagttccggatgctccgcttccagcgctttcagacgctgcatcaggcggtcatattccgcatccggcacttccgggttatccagcacgtgataacagtattcatgatggcgcagtgtggcgcgcagctgttcaatatcgttttcgttattttttggcatcatagtgatctgcaatctgtttatacctgaaaaaaacccccgtcattgcgggggtttttgtgcgatttgtgggtctcagctctgtttggcaacgagaactttgcggatgcgcgccttgtacacctcgattttctgcggtgtcagcattttgcgttcctcatccagtaccacgccgccgacatcagaggcgatacgctgagctgcctgtaacatcagcttgaagttctggcttgcatcaccgtaagacggcaccatcataaacatagccacgcccggggtttcgatctcttccatctgctccggcacaaacgtgcccggattcaccatattggccagactgaataacaccggaccactgcctgccggatcgacatggcggtgataaatgttcatcgccccgaaacggaacccggcctgctcgatagcggtgcgcagaatgtcacctgcgaccatctgtcccggatgggcggacacaaacagtgccagcacaatctcattgttctctgcactgctgcgcggtgcttcctgaaccggttccggttcagttaccggttcttccgtgtgaggcatgtcagtttcagccgcagtgatcactgcggctgttgtcatgacctccggagccggagcagccggtgcctgtgcttcctgctcaagggcatcaaataatccgatttgcggctctgtttccggtgcttttaccggctgacggcgcgggctctgggctttcggcatcacaggcggctcttccggctctgatgacggatacattctgccggcagataacaacggatcctgctcattctgcgcttctgaatacggggagacctgcggagccggatcttccggtaatacagcagagtgacgggagccgtgtgcctctgacatatcatcagcggcttcatcctgcgactcgtatttacgacgcttcatggggcgcgcgcgaaacagggaagaacgctctttacggctcgtccacagtccgtgaagtaacaatgcgatgattgctaccgcacccacaacgattaatatcagacgcaaatcttgcatcagtgctatctctgttgtttaaattaaaggccaccatggcaaaatactatcgtttgattacaagagtatttgtcaatgatgttaagttcaagtccctgcacgaatttcttgcaataaagatcatttaattgctctttttgactgatttttcatcctgacatttcatttgtggccggacaaatcaatagttcagtctgatagtataacgttttccaatcataggagtgaataggaagtatgacaaatcctgtcaggccgctcagcggctttgcatatgttgcacagggatggcggctgatgatgcgtccgggtctccgggccttcgtgattctgccgttgctggccaatatcgtggttatgggcggtgcactctggtggttgttcagtcagttcggcgggtggatagcctggctgatggataaagtaccgggctggctgcagtggctggattatcttatctggccggtggcggtgatctctgtgctgctgattttcagctattttttcagcacgatcgccaatatcatcgcctcaccgtttaacggctggctgtcggagaaactggaagcggaactcaccgggcgtcccgcaccggatcagggctgggcggatctgataaaagatatcccgcgcattctgaaacgggagatggtcaaactgctctattacatcccgcgtgccgttattctgctgatcctgtttttcattccggggatcgggcagacactcgcgccggtgctctggtttattttcggtgcctggatgatgtccgtgcagtacggggatttcccgtttgataaccacaaggtcagttttccggaaatgaaaagcacactgcgccgcgataatatgaccaatctccagttcggttcgctggtcagtgtgctgaccatgatcccgtttgtgaacctgttcataatgcctgcggcggtctgcggtgccaccgcgctgtgggtggatcgctaccgcgcacagtttgtccgcgactgatccgcaacccccttccgtgcagggcggttatcacactgccctgccgttttcctgctccttatactttttcgctattgatcgtctgtccggttataaggatatgccgattatgtatttcctttccgccggtcagcgggtaatgtggttttatatttagtctgattatgaataaccctataaggaaaaccgatgagtaagatatatgaagataattcgctaaccattggtcacacaccgctggtgcgcctcaaacatttcggtcacggcaatatcctggcgaaagtggaatcccgcaacccgagcttcagcgtcaagtgccgtatcggtgccaatatgatctgggacgcggaaaagcgcggtatcctgaaaccgggtgtggaactggtcgaaccgaccagcggtaacaccgggattgcactggcgtatgttgctgccgcccgtggttacaaactcaccctgaccatgccggataccatgagtatcgaacgccgcaaactgctgaaagccctgggtgccaacctggtgctgaccgaaggcgcgaaaggcatgaaaggcgcgattgaaaaagccgatgaaatcagcgcgtctgatccgtcccgctatatcgtgttacagcagttcagcaacccggccaacccggcgatccatgaaaaaaccaccggcccggaaatctgggaagacactgacggcaacgtggatgttgtggttgccggtgtcggtaccggcggcaccatcaccggtatcgcccgttacctgaaaaacatcaaagggaaaaaagacgtcactatcgtggctgtcgagccggaaggctccccggtcatcacccaggcactggccggggaagagatcaaaccgggcccgcacaaaattcagggtatcggtgccggttttatcccgggtaacctggatctgagcctgattgaccgcgtcgagctggtcagcaacgaagacgctttcgccaccgcccgtaaactgatggagcgcgaaggtattcttgccggtatttcatccggtgcggcggtgattgcggctgaacgtctcgcgaaagaagataagttcaagggcaaaaatatcgtggtgatcctgccgtcttccggtgaacgttatctgagtactgcgctgttcgccgatatcagtgaaaactgatcaactgaacggattcagtccccgccctgcctgacctcgaaagcacccgcaaagggtgctttttttgtgcaacggatcaaagtttgacactctgcggggtgatttttgtgcggttgtttagtattaaaaaagtaattatttcacagctcaaaataatgacaccaaatacgtatgtcgaatcttcgggttgtgctattttacttgctccggctatgattactgttatatgtcttaatattaaccgccgataaaaaattccaaacatgaggtaacgctatgtatcagcaagaagtcaccattactgcacctaacggcctgcacacccgtcctgcggctcagtttgtcaaagaagccaaaactttcgcttctgacatcaccctgacttccggcggcaaaagcgccagcgccaaaagcctgttcaagttacagactctgggtctgacacagggcaccgtggtgactatcgccgcagaaggtgaagatgagcagaaagcggtagagcacctcgtcaaactgatgggtgaactggagtaatctccttccgccctcacctgtcaggatccccggctgccgtctcatgccggggatagtccgtttccgggtacgctcacgcagcccgctgctgtacgtcccccagtaaactcaaaggtattattatggtttcaggaatctctgtttcaccgggtatcgcttttggtaaagcgttgttactcaaagaagaacctatcattatcagccagaagtcgatttctgctgagcagattgatgctgaaatccggcgtttcactgaaggccgcgccaaagcgtccgcacagctgaatgccatcaaagaaaccgctgaaaaaaatctcggtgcggaaaaagccgaaatttttgaaggtcatatcatgctgctcgaagacgaggagcttgaaaatgaaatcactgacattatcaaaagcaaaaaaaccgcagattacgcggtacaccaggtgattgaagaacaggccaccgccctggaaggtcttgatgatgagtatctgaaagaacgcgcggccgatgtccgcgatatcggtaaccgtctgctgaaaaatattctcggcatgccgattatcgacctcagcgccatcgctgatgaagtgattctggtttccaaagacctgacaccatccgaaaccgcacagctgaacctgaaaaaagtgctgggctttatcaccgatatcggcggccggacctctcatacctccatcatggcgcgctctctggaaatccctgccgtggtcggtaccgggaatgccactgaaaatatcaaaagtgatgattacctgatcctggacgcggtcaacaacaccatttatctcaatccgtcagaagaagatattgagcgcatgaaagaagtgcgcgatgactatctggcggaaaaagccgaactggcaaaactcaaagacctgcctgcggtcaccctcgacggtcaccaggtggaagtctgtgccaacatcggtaccgtgcgcgatatgccgggtgcggagcgtaacggcgcggaaggtgtcggtttataccgcaccgaattcctgtttatggatcgtgactcgctgccgacggaagaagaacagttccgcgcttacaaagaagtcgctcaggcgatgccggatgaagccattattgtccgcaccatggacatcggcggtgacaaagccctgccgtatatgaatctgccgaaagaggaaaacccgttcctcggctggcgcgccatccgtatctgtctggatcgccgtgaaattctcgatacccagctgcgcgcgattttacgtgcctcggttttcggaaagctgcgcatcatgttcccgatggtaatttccgtcgaagaagtccgcgaactcaataagatagtggacgaaatgaaacagcagctgcgggatgaacagaaaccttttgatgaaactattgaagttggtatcatggtggaaaccccggcggcagcagttaatgcacgtcacattgcaaaagaagtcgattttttcagtattggaaccaacgacctgacgcagtatactctggctgtggatcgcggaaatgagctgatttcccatctctacaacccgatgtctcctgcggtgctgaaccttatcaaacaagtcattgacgcttcccacgcggaagggaaatggaccggaatgtgtggtgagctggcgggtgatgaacgtgcaactttattgttgctgggcatgggtttagatgaatttagtatgagttctattgctatcccgcgtatcaagaaactgatccgcaatacgcattatgaagatgcgaaagcactggctgaacaggcactcgctcagccgacggcaacagaactgatggcactggtggaaaccttcaccaaagaaaaaaccctgtgctgagaaagccaaattcacgcccggtcccgtatcaacatttaggagagtattcatgggtctgtttgacaaactgaagtcgctggtttcggatgataaaaaagacagcggcacgattgacatcgtggcgccgctgtccggtgagattgtgaatatcgaagatgtgcctgacgttgttttcgctgaaaaaattgtcggcgatggtattgccatcaaaccggcagggaacaaaatcgttgcccctgttgacggtacaatcggtaaaatttttgaaactaatcacgcgttctccattgaatcggacagcgggattgaactgtttgttcacttcgggatcgacactgtcgaactgaaaggtgaaggcttcaaacgtattgcggaagaaggccagcgcgtacaaaaaggcgacctggtacttgaattcgatctggcgcttctcgaagagaaagccaaatctaccctgaccccggtggtcatctctaacatggacgaaatcaaagagatgaccaaaatgaccggccctgtcactgtcggcgaaaccgttgtcatcaaaatcaaaaaataacggcttctgcaccacagtctgtacactgaaaaacggtttctgcggaagccgttttttttcgtccgttttcctttaattgattaattctgttttattatcccctgcctgttgtccggaaattaccggaaaagtatttctcacctcagtgaaatgcgctaacatgatctcccgtgacggtccgcaatttacgcagattacgcactgcctgatacggccggatccgccggaaccacgagcgggataaacgggaagttttcattttcgttcgtcacaaaatggtaatgctatggaatttaattcagttcagacacagcaaataaagcagaacatgcgcctgttcactgagcgcctgtatccgaatggtcatatccccgatgagttcgatgttcagtaccgtacggacaataacaacatactgatttatcagaaacaactcgtctgcccgtgcggcaccccgcaaaccattgaaaaacaaattgccagactgacctggtcagaagctgatgataactggcagcttttttatgtggataacaacaaatggcagccttatccggactgccctgccggtacactgagtgcactgctgaaacaggttctggatgataaatccgaccgttttattttcagttagtcaccacatcacacaattaagccccgttaaggggtttatttgtgaattttgatcgttttcacgtatagtgctcattacgcaggttactattactactaacttatttgccggctttcagattgcgaggtgtgtatgtataaaacgattatagttccaatcgatatttccgaaaccgggctgacccgcgaggtgatcccgacgattcagacattagccaaatttgaaaatgccaaaattcactttattgcggtgatcccgtcattctctcactttgcctctttcggtattgcctatgccgcaaccctgccggaaaaagatgaaattctggacagcgccaaagagcagctggcgaagatggtcagtgattttaatctgcctgctgagcagtttgaactgcatgtggtttccggctcaccgaaagatcagattctgaagctggcggataccctggaaagcgacctgattgtcatcagctcacgccgtccggatatgtccacctatctgctcggctccaacgccgcagcggttgtgcgctacgcccatacctcggttctggtcgtccgctgatacgcggcagtacctgactgaacgcccgccctgcgggcgtttgttttttattttccccggttgaccagcacaatcccgcagataattaccgccccggccgccagcaccgtgcccggtaacggctcctgcagaaagaaatagccgcacagccctgccgtcagcggattcagggcaataaacaccccggtgcgggtggcgccgagtttgccgatcccgtcataatagaaataatacgccagcgccgacccgatcacgccaaggaacagcagcgagagaatatcccgcattgtcagcgctgctgcggcttctgcggtaaatgaaccggtaaagagagaggccagcagcagtaatccggtaccggcaaaaatggaataggcaacggtgaccaacggcccgagcgccgtaatcaccggccgggaaaataccgtgtacaccgcccagctggcaacacagcccgcaatcagcaaatctcccgtcagggtatcttccccgccgccgctgaggtccggacggctcagtaaaataatagaaaacgccccggccagacagcagacaatcccggcgattttgctgatactcagggattcccggaagcggaaaaagccaatcagggcgatcactgccggattaccggcaacaataaacgatgcccgggatgcctgtgtgaatttcagtccgtaaaagaaaaacaggttatagagaaatatcccgaagaatccgagcaaaaataacgtgcgccactgggcggccgtcgggcggacaaacggaattctgctcagtttaaagataagaaacagtgccgcagaggcaatcaggaaacgaagtgtggcgagaaataatccgctgatttccggtgataagatccgcccggccacaaacgtgccgccccagatcatggccaccagcgccagtgtaatataactgcgtatgtgactctgatttgcggacggtgttgtgttcattacagcccctgtgcggtgtaccagtcacggataaccgcaaggatctgcgcggtatgccggtttccgtctgtatctttaaaatagtgatccagattatcaaaggttctgaatgtcaccaccgggttctccaccgctttctgcatctgcttaaacgatgtgacactgacattggtatcattcagcgtctgaataaccagcaccggttttgtctgcccgttcagtacctgctgcgcatccgccgccagaaattcgcgccaccagcacatcccgtgctggctgaccagcatatcgtccgccacctcattgcgttttaccgcatcagtaaatgccagaaaaccggctaactgagactcttcaagtggctgaggactattacggaagctgtccgtgacatcatccaggaaaaagcgcccgccgccattaacagccaccaccgcgtcaaccgccggtgatgccagcgccgtgtgctctgcgacagtcgccccttcactgccgcccagcagcagtacggtgccatactcccctttcagacggtcgagcactgcagcatagtcgctgacccgcaccgacagagaatcattaagcatagtttccgccgggcagtctgcccgctcgccatcgcggtcattaaaaggcagcgcatcggtaataccgtatttctccaccagcagaatgtcatgatccgggaacgcgccgccgaaagtattcaccataaaacggttgtttttggcactgttacagtccgagccctgaatcagtaccagtaatttacgggtgggttccgcctgccggtgcagcaggtagtaatgaacagcactgccatcctgacgggcaaggttttctgtccggacagtttcttccccggtattttgtgtttctgatgccattgcaggcgccatcagcagacaacccagcagtgcacagacggcagccttacgcattcttcatcccttcacataaaacagataattaaacaatgtgcggaaaccgagcttctgatacagactcaacccttcggacgacgcttccagataacaatcccggataccccgcgttctgcacagtgtcagcgcataatccagcaacagtgtggcgcagccgttgccctgatatgcaggaacagttccgagatcatcaatccgtgcgccgtattctgacaacgacagcgtgatgcagctgaccggttttccctgacacagcagaacagcatggtgcagctcagtaccgtttgccattgcccgctgatgatagctgatatagtcactgacgatactgaaatccggcgcttcttcgtcatcctctcccgccggaaaagcggcttccagcggctccgcccacaacgaaagctggtcatttacctcacggatttcacatccggccggaagaacagaagacggctgccattcatcaacagacagatgcatagcactggtttcaccgtccgcctcataaccggcggccataatctgcgggtgcagtgcttctgccgcggatttctccgccaccaggcaatgaggtttgtgatgcgccgtgaaaggctgctgcgccagtgagaattcattattatccgcaccggcctgcagatagatatagttaaagacaggcaccggcagcggtgtcagatagcattctgcacgatcactgacggtgatgacatcctgcgcgatacttcgccagaaatgacgctctgttgcgcggtaattctgtaaactcatggtgtctccggaatggtataagcattggcgggatttattatccccactctataatataagccgttatataccttatcggaatgttaaggtattccggagcctgatactcagcccctgcgtattgccataatctgatgcaccacaatgcccgccagcaatccccagaaagcagagctgatgcccagcagcgtaatacccgatgccgtcagcagaaaacagataatcgccgcatcccgccctttttcatctgccagcgactgatgcaggctgttcatcagcgtggtcagcagagcaagcccggccaggatctgtatcagaaccgccggaaaggcattgaacagcataaagaccgcgccgccgaaaatccccgccaacagataaaatatccccgcccagacagcagcggtataacgccgtgccggatccggatgcacatcgggcgccatgcaaatcgcggcggtgatcgccgcaatgcagatactgaacccgccccacggtgccagcaggatagccgccagcgacgagcagctcagcagcacagaggtgtgcggcggataaccgttagcctgtaaaatcgcaatccccggcgcattctgcgaggccagcgacacaataaaaaacggaataccgacactgatcagggacgtcagggtaaatgacggcatcacaaattccggcagcgcaaacacattgccggcccggacaaaatgcaggtcaccgctcagtccggtcacggtgataccggtgatcagcgcagcaataatggcgtacagcgggaaaatccgccgcatcaccacatacgcggctatcatcgcggcacacagcacaaagctggtattcagcgcaccgaacgccgtcagcccgaaacgcagaagaataccggccagcatcgccgaggccagtgcgcgcgggatataattcatcagccgggcaaaaataccggtcacgccgcacagaaacatcagcccggaggcaaacataaacacgccgacggcttcattgatggtcacgccggacaaactggttaccagcagcgcgatccccggcgtggaccaggcggtcagcaccggcattttataccagagcgacaacccgatcgttgtcacccccatcccgatccccagcatcatcagccagccgccggtttgtgcggcatcaagccccgccacatccagcgcctgcagaataatcgccactgaactggcatagccgaccagcaccgcaaccaggcctgtcattatcattgctggagaaaaggcacgaaaaaatgttaacttactcataggaacacaccatcggatgttatagcagacgatcggactctatcaccggatgctataacggacaatgacatttacccggaataatgacaatttatgcacgatatcacacccgctgttgcagagacctttaaacaactgcgtgccgaacgcgggctgagcctcagccaggcagcacaactgaccggcgtcagcaaagccatgctcggccagattgaacgcgggcagtccagcccgacagtatcaacactgtggaaaatcgccaccggcttcaatgtggctttctctgtttttctggaaggcgcacagccgcaggtgcaggcggggcttcattcgtttgcaacactgccggtctttgaacagacccgctccgggatgcgtgtcacaccgctgatcccgtttgatgatgaactgaaaacggatttactgaagattgacctgctgccgggggcgctcagtgaatccggccctcatgaacccggggttatcgaacatgtcattgtgctggaaggtgctttacaactgcggctgggggatgagtggcacactgtttctgccggggaatccctgcgctttcatgcggatatcccgcacgcttacgccaatcccggtaagaccattgtgacactgcataatctgatccattacccgcatccggcggacaaataaaaaagcggggtataataaatataccccgctttgacttaacggatcgtcttactttatttataaaataaaaccaaaataaatacgtgttcagcttaacttattatatatcatccttataccaaccgggatgatatgtttatactgaacagaaaagcatgccattcagaatacaatcttctgttatatatagcggtttatttattgtttaattaaacacactcaggcatatcactatgctatcgtgatgttttcactggtgttgttacttctgcctttacggcattttggtgttgttcaaaatgactgtcgcagcagcctttctggtgtcttaaatactattattattataactgcatctggtgttgttaatattattgttactgcttattttattattattgctattagtctttgctgtttcttttttattaaaggtattaccaaactgcgggggcattatcgtacagtgatcctgaaccattctgaaacgaaattacagattacggttaaaatataaaaaaaagccaccattcctgccggatacggtggcttaaatacaggattaattaatttatttcagtatgttatcacacatcagctgaagtgtattaataaaccttgctgcatgaaagccatcacagactgcatgatgaacctgtacagaaacaggtaatagtacgcggtcaccttcctgctgaaactttgccatcgtaaaaaccggggcaaaataatcatcatttccggtgatattcagattaaatccgtcaaaactcacccacggtaatgatgatatattcaggtgattctccggtaaatttccctgcggaaacaatccggtatcatgctgatattcttccgttaccgcgttataacccaccataaactcactgagatccggaaaataacggcaggacagtgcagagaatgtttcggtttctttatgaaagacagtaaaaaccgggtctgactgatcccagtaaatcagttcattatctttcattgtcatccggaactccggaaactgattaacagcccgcgagatcaagtaaatcatcagcggataaaacttataaccggtttccgccagtgcggtacgcaaagcggtaatatcgagtttggtggtcagactgaatccgcatttaatctgctgacgataaagggcaaaatgctccctgcgattccaggtattcaggtcaatccgggtaaaattcatggttattccttctgattaatagtgaaaaatattaataatcagaaggcagtctggttgtctcaatgggtaacattccgtcctccgtaagctgtctggtattcagtaataatacccgatacgggcttaatctgtattaagtccggctttatttattccggccagtcatccgcaaacacatagcggatcagttctgcggattcacggggcggtgctttcagcacatcctccattaaatcaatttccatctgacaggtttgcagcttatcttccgccagtacatacggatcatcagtcaggaaactatcgccgtatttatccaccgacccctgtatttgtgccgaaaataatgactgaatttcatcagcggaataatgcgcaacaggcgctccttcaccggctgaattcaccagatccagcaacgctctgttaccgataataaagtcacggtacccggcggaagcctttttcatatccggcggtccagacacttccggatgcagcacacgaaagcagaagtcaccggaggtatcctgcgccagtgctttctgcaaaaattccagccgcattttcccgtaattaatcaccgcgtcatcccccgcgagataaagcagttttttaatattttcagtggcccactgctgcaggcgcatatagtactcttcccgctttttcgaacccttaccggcatttctgaaatcggcaaaaaaggcttcgaacataacgggatcaacctgattgatggctttcagtgtcggtaccatctcaagaacctgagtttttatctgttcatttttttccactgccgcacttttaataaaaaatgcaaaaaacagcgcaatcagtgacaaataaaccgttttcttcctgctgatcacaattttattggtaatggttaatacaatcagcaggataatcagaaaaataatcagtacagaaatcacaaaataaacggacattcatctctccggtacagggggaccattcaggcagataattcttttttagtcagatatccggaagggaccaggataatcagaatagtgaccgcaaaactcatcaggtcgacaataagatagtccgtccgccacatcagcagcgtatcaatcacggtataaagaatcgccgtattataggccatcgtaaatccgatatcgcgcagacgtttagcgagaatattgaccgagcaccagataaacaggccgcccgcaaccacaatataggtaagaaaataagaggaagagtaaggaaatccgaaaaaatcgggatataccggcatcgtcactgccgccagtccggcgaacagggccagccagatattggcaataaaatagggccagcgcgtgagaacagcagttctgtccggttgaaacaattctctgaaaattcgtttattcatccggtattccctcccggtaactattttccctgataaccagtatatgtcaccggaacacgtcattctgagaaaactgtcactaatctgttttattccgcaaacagaaaaccaccggatgaccggtggttttctgtacttattgatatcttacttttcccgctgcttaatacaggtctcttttattttttgtatattatttttcagggagacctgatgttctttgggaaaataactgtaatccagagaaatataaaaacgggcgtcacgcatcatgacaaataaactgatttcgttttcttcagatttataaatgaaatgttcttcgtctgcttttttgctttccagtattgagggtttcccgtattccgcttcaagattgtgctgtaattctttcagcagtgtctgatatgccgtttcatcatctgtggaataaaaataaccaataccgaccagtccgctgaaatccggctgtccgtactgtggtaagaagcggaattcgtactcacccgcttcatttaatccgccggaaaatgttttggacgtcactttagtcagcgggcagacatattcgctgttatccgtttcagactgactaccgagccgtggtaccaacgccttttccgtcattccccaggtaagaccgaaaggagctgcataacgctcactttgtccggtatccgctgcttctgttttatcacaggcgctcagtaatagtgacgctgcaaccaatgcagaaattatcgttatttttttcattgttcagtatatccgctgatttaatgtgacgttatcccgccatatttgacttatcatttaatccggctgttttccggcaacaaacaatatcaatcctgaataaaagtaccagcaaaaaataaagcctccgtaaaggaggccgtatcagctcccggtgtttttattggcgtaaaaacggcagtaatacatccatcagttgttcaggacactcttccgtcacaaaatgaccgcattcactgagtatcgcgccctgcaaattcaccgccctgccctgcattgtcagctgcggggcatcacgggtcgcgtgatcggcaccgatggccagaaccggcatagtcagttttttctctgcccgctgcttattctgcgcgatggtctgcggaatagcccggtaataggcaaacccggcacgcagcccgcccggagaggaataggcatcgatatacgtctgtgcggcaacgcggtcacggcggtatgcccagtggtcaaaaataaaattcagatactcccgttctttaccggcggtcagcgtttccggtaaatcctgaacctgattaaacataaagtgccagaggaaaatattctcctccggatcaacaaaaatacccggagccggtgccagacccggaataacagcctcggtcaggacgatttttttaatatctgccggatagtcaccggccagcgcataaccgacccacatcccgatatcatgaccaactaccgaataggttttataacccagctgattcatcatggtatgtaatgttgtggccaccgcgccggtatcataaccactgtccggccgggcagaaaaaccggttcccggcggatccaccgctatcgccatatatccctgtgctgccagtcctgtcatcacataacgccatgtgtaccaggtctgcggccagcccgggatcagcaacaccggttcgccttttcccgccgtcacataatgtatccgctgccccgccacatccgtatagtgatgctgaaaatcagcctcattcatctgtgcagttaccggcggtttcggtgtgttctccgcaagcacactgccgtggattgtgaaagtcattaccgctgccagtaatgccttaccgaataatgtattcatacctgttccgtataagtcataagttaaaacgtctccgcagcagcccgccaaaacggatgttgcctgcaacggcactcaattatttgtcgatcaacaatgaatagattaaagggacattcaaatctttgtcaatcactaaaaaataattctttgttaaacgataaagaactggtagcatttgcctcagataaactatgcggagaaaaaataatggccggcagaccacgggaatttgatcgcgaagttgcattacgcaaggctgaacaggtgttctggcagcgcggttatgaaggaacatccatgtctgatctggttgcggcgctgggtattgcatccgcacggatctatgctgccttcgggtcgaaagaaaacctgttccgggaggcaatagccctttatctggcggaagaaggtgcatttgcggatgccgccctgaaagagccggatacccgcagtgctatcaaaaaactgcttaccggtgccgttgatacctatacgcgggatgaccggccgcacggctgtatggtggtgctgtcgctgactaattattccgctgataatgaagccattatgcactggctggcagaccaccgccgggaacgaacaagcgggatcatacagcgtctgcgccggggggctgagtccggtgatttaccggaacatactgatacacaggctctcggggactatgtggcaacactgctgcacgggatttctgttcaggcacgggatggtgtcagccgtgaccgcctgctggccatgacagagctcgccatgcacacgtttgatctcatgaccgcctcaccggccacacactgaatctgtttctgtctgcaggagaatccctgatgtcctcttccgtccgcccgatctgcacatggctttccgcctcccagcccgcatccggtgaagcatttccgtttccgccggacattccggccattaccggcaaccagaccctccggcagtcattgcgtatcagcacaggcggacagaaactgcagctggtgttttccaaccgttacggcaccgatccgctggtgacaggtgaaagttatctctccgttcccaacttacacagtgcagtaccggtcacctttggcgggcagcagggtgcggtgatccctgccggtgatatcctgtgcagtgatgaaattgcactgcatgttccgtcattatcggaactcacgctgaggaccttcctgccagagccggtaccgcttaataccttccactgggatgcccgtcatttctctttactggaaccgggtaaccggacattacaggaagagtccggaaacagtgaggctgtcagttcccgtcttttacttgaaagtgtgctgattcagccggaatcagaagcccgcacactcgtggtgatcggcgattcaatggttgacggcaacggcgtggatatggacacctatggccgctggactgattatctggcagaacgttttattgacaaaaacattgccgtggtgaatgccggacaatcaggttcacgcctgctgaaagacggtatcggcatcagtacattatcgcggtttgagcgtgatgtgctgatgcaacccggcgttacctcctgtatcgtgcaggtcggattaaatgatatcggcctggcgggaaccgatttggacccggcgggttctgtgccttcggcagcggatatgattacgggataccggcaattgctgaccatggcgcggggaaaaaatatccgtatgaccgtcgtcaccctggtaccactgcggggaaccggtgagtatggtatgtccggtttttattcgccggaaaaagaggctgtacgacaggatataaaccactggatgcgcacaagcggtgagtttgatgccgttattgacagcgaccggctggtaagcgacccggtctgccctcagcagctcagtgcggactatgattcaggggatcatcttcatcttaataatcaaggacacaggctggttgcacagtccgtcccgctgacggttatccggccctgatatcagaaagccccgctgcttcagcggggcttcgggtattcctgtacagaacccgttatgcttttgttttcagcgccggtgtagtcactgccggtgtggtgattccgggtatcgctattgacggcgtggtgactggcggcgttgttggtgcgaatgtcggcggaggtgtgatcagtggtattgagattgtcggcaaaggaaactttttcgcgcttttctttcctgttccctgatttacgctatccgttttttttactttatctgtcattttttattcctcagataatatggctcttcattgcgctgagtaaatactctgttgttttataacctctgataattactcaggaagaaaacaatattgctttgcggagtaatccggcctgcaactaataaaggagatcaaggtggcatggtgacacaatcagtaatcattggtgttcttgttaccgaaggtgtacataccggtgttaccggcggcggacacgtaggtacaggcggacatgtcggctttggtttctccggctctttgcatttgtgttcgtgttcacaacaacactgacagcagttattcacacgaatagtgataactgtctgtccgttttcacaacatacgtctttttttacttccgtcattttctgctcctcagatagtgctcatccgtaaattgctggttaaatatacagcaattgtatgatatctgataatcagctccggaaggaaaaaaacacaggaattcagcgaaatggcaacagaaggaaaagatatttaatcgtgtttctgatacgggggataatagaaagctaaccggggaagttaacattcggtgcgatgaccatcgtgcattttgctatcagagataacactgcgaaatagaataaatagcccagccatggcttcatgttcagtctccgtctgacgtcagaacaccatgctatgacaccggtaaatcaggggcaataaaaaccccgccggcgcgggctgaatgcgtggttatccgtactgaattatcattaatctgtatctgcccagatttgtacctgtgattcactcaataatgctggcatgaaactgaacatgatcaggacggataaagagaaccagatgccagagcccgggggctttccgtgaaggatcgattaaccctttaaccccgagtgattccaggcggttacgcacatgccatgatccgggaacaccaccattctccgcaatttcctgccacggcgccattgcatcgttaagatcaatacctgcggctgaaacagcatctgtatttctcagatcaaggattttatcagcctctactctgacttttatcatgacaagattggcactcctgttaccggcgtgagctttcattgccgcctcaacaccttcagtagatgaactgagataaagtgcaggctgatgacagtttgaataacgccccgggcctgtggagccggataatgcaaactcccggtatgccggatctattgcccgataaaaaacaccatttatatcagtgagaaaatcagagatattcataaaccggccttatttttgcagcaaaaaggaaggaatatacattagcggtttatgtgtgcttaccacaagcagggtatgggcgaaaaaaagcctcagttaagaggcaactggtgtttgtgatgacaaggccgtccgtggcctgtaaataacgttattatataaaatgtcatccggtgatttttacccgttatcttaattttccggcttttgatacgggtgcagctcaccaagttcattcgtcatatattttttaccggcttcaaaatcaacaccttcataataaacagaatagcgtttgcgtgttccgtcatgccatccggtaacaatcactgaacctgtacctgcacttacatgcttaaccggaaactcggataacaatgatgactgaggaccgatatcagcgtaggtctgtaatccaccagaaaaagccgtaaattcagttgaatccctcccgccgatactggaattatcacctaaaatcaccgcttttttaaacgggccttcagaaccaacagcagtattatttcctgtggaaataccaatgctgccgcatcccagatcaaatatattactgttttcccctgtaacaatccccaagctattctgaccgcccggataggcaaaagactcatcgccggtagcaattaagagcgcatcctttaataatagctcatcatcgtcatcatcatcgctatatacatatggtacatagacctccgccccctttccggatgtaaatgatactgatccggaagaggcttcaataaaactgttctcacctgttgcaacaaaaaatgagccgtttcctgtgtttttggtataatttttatccggatagtaagtattaccttcattatcatatatttttacgttattgcctgtatggataatttctgcattatcaccaatacaattgattttctgattatccagcgtaaaaatgcctttcttggtctcaccgctgataatcaacgcttcactgctatttaattccgacataaatttcaccttattagatgataagcaactgtacaaacatacagtttatttatgtgacaggaaaatcacctccggaataacaggaagccgcagccagcgggaagatgagccgtaaacggcataagtaatatatcaatcccgcattactttcgctgcaaacaaaaaatcacctgtgattatctgacagtcatgaatatttgacttaggtgatctcggttattttgtgataaaattttattactgtcatttttactcattatatggatgtaatatttttaaatgaatagtaaaatacttcccattcttacctctttgttttctttgttgtttatgtccgatgctcttgcttcaaaaatgtgttcagatgagcagagaagcattaacaaacagaatacttatataattaccggtgatattttttatggtcccgtaaaatctgtaaaagccatccacacaagacctgaaaataaatatggcaaaaccgataatgaaacgactatttatcaattttcggattgtaacgaattgaccgaattcagctggaaatcacaaagcgttatatcaccgtcaaactcagtaaccttcgttacagaaggcgaattaaccggtcgtaatccttaccatgttaaagctgtttctgacttcagtgcaccaggtaactccaggtataccactgccagcctcttttattacactgacagcaatgggcgaattatcaaaaatgaggaggcactcctgactaagaacagagtcttttctgatgccgatgaacaaaatcaacgccgtgaattgtcagctgactcagacaataccctttctgtttccgctattaactggaaaaatggacttattgatacccgaattggcgagcaatatggtgccaaaatagcatttcaatataactataatcacctgaataagctggaaagtgttattgattctgcatcggataaacctgtggatgtttttttacaaaataaaaaatatagctatgattcaaaaggttttcccggtgaagcagtgactgagttgtatgaaaatagtcagcttatcaactctgacacgattaaatgtcaggaaaaagattcatatggaaattgcctgacgacaactaccataacaactaagggaaaatttaagcctgaaatcacaaaaaccacacaatatatctatacctattactaagtatctatttgagtgatggctatctgacaacagtcatcactcaaacacccgaaccggtcagatgcctgacaacagtagtggctctgaggtttattcactctccccgtattgaacacttaccggacgcaattttttataacaaaagcctttagtaccatttgataatgtaaagtctgtctggtgaatactgatatagatttcacaatgtccctgagtactatcaacgataaaaccctgagtattataattggtacgggtttctgccaaccccatgtaccagccattactgaacctgatacgtttatcagtaaataaattttcagctaacactgaaatcttaacctgctgctgtggctgaagttttatactgcctttccagcgttctaattcctctggcgttggctctctgccatcttcagattgtaacgtatagatataaaccacgttatctgtttcattttttatgaaaacagctggtttaatatattgaacaaacaggtacaataaaattaaaataaaaaaaacagttataattttagctatcttatttttcatcattacttccctgttttcttcctgatcctgtttaataaacaccaatgctgcaatccggaggcgcccgctgaacagattatcagcaacgaaatttatactccagcactgatcatctgccctcgcaaccgggcacgccgggctgtggcatatcgcagggggcagctttgcatcatcagagatatgcagcgtaaagtggcatggaattatccggaagacagtaagaggacggaaacgtacagaagtggtgccggacagcaataagaatatgattcctcttatatcaaatcatattttcaatccttaatatttgttttcttatccgataattaatgagtcctgactaccatgtttagataccagctcttaatatcctttttgatattaacgccatgcttatcagcagcctcatatttaaactcttgtgacttagatataaaggttaccaaattaataccggcaaaatccgattgcactgaaaagaaaggcgatgacaactctcaggaatcctgcacgattcaaattgacgggaaagtcattaacgctgcaccttcggggcgggctgatggcgggtaccagcgctacataggaaacaaatctgtattcccgctatctgtcactgtggacagagtgaacttcaggcctggtgatgtcattactgtaaatcgatatatgcgcgacggtcacctgcatcctatgtcaatatccaccacttttttgggagtaaaagagaaggatgattatcgatatcgataatttcagttgcctctattgtcaatgatcttcaaaaaatccgccatgatgatcattggaaaatacgccatctgaagactaaaaaacagggttaaataatctggttccttgtcggtgaaatataaaaaagccccgctatttagcgaggcgttgtagtaaacagaattaagtgccaattaccagccagtagctgaccccgttggtacaggggtcgtcggcttcggcgttactggcggacaggttggtttcggtttttccggctcctcgcatttgcagcagcactcacaacagttattcacgacaatcttaataactgtctgcccgttctcacagcatgcttcctttgttacctgggtcatgataattcctttctgatatcaggctcccattgagctgtataattatacagttgtcaggtggcgcttaataatcagctccggaagaacgatgtgctccaatctcccgtattgcccgcttattgtgattgcagtcagcaatcgactccattgcatcggtcagttcatccgggataaccgg

SEQ ID NO: 44 - DNA, 12218 bp, unknown
  Altogen 322075 strain
tttgatgtattttgtcttttttaaaattaagaatatttacctctgtacaatggccttaaattgatctgtctcagattaaaaaaagccaattgctgattggtttttatgaatatattgtcaatacgtaaacactttgtagtactttctttcctgtccgttgtctttattcatttttattacttgctatagtgatatctctggtttttatgaacttatcggacaataaacaggaataaatcatggacaaacgtaagtttctgacccgttatgaagttgacgccatcctgaaagaagcccggaaaagccggtatgccgaacggaattactgcatgattttaatgtgctatctgcacggtttccgcgtcagtgaattatgtcatctgtcactttctgatattgatctggacagccgccttatttatgtccggcgtctgaaaggcgggctttccaccacacaaccacttattgatattgaatataatgcgctggtgtcgtggctgaatataagaaatacctggcgtaaccgggatttggaatgggtatttttatcgcagaaaagcggggctatttcccgtcagcaggttcatacattattaaagcagtacggcaaagccgccaatatatccgtcgcaccacatccgcatatgctgcgccatgcctgcggctattcccttgcggatctcggccgtgatacccgcctgattcaggattatctggggcaccggaatatttcccataccgttatttataccgccagtaattcaaaacgttttcagcaaatctgggatcctctccgcggataatccggccgcctgtccctgaactttctctgttcccgcaaacaggtattattctccgccgttattgtgttattcctgtgatcacccgggcaccgctcagattttcgggcggcttatgatttttccgggcacagagtgtgtaacatagcggtgaatgtaaacggacagataaagaggaatatgtgaagaaaaaaatcattcttgactgcgaccccggccatgatgatgccatcgcactattacttgcttacggtaatccgcagattgatctgctggcggtcaccacagtggtcggtaaccagacactggagaaagtgacacgcaatgcgctggcggttgcccgtattgccggtattaccggtattccttttgcggcgggctgcccgcgcccgctgatccgcgggattgaaaccgcgccggatattcacggtgattccggcctcgacgggccggtattgccggagccggtgctgacattagatccgcgccatgcggtgcagctgatcattgataccattatggcgcatccgccgaaaaccattaccctggtaccgacagccggactgaccaatatcgcgctggccgcccggctggagccgcgcattattgaccgggtcaaagaggtggtgctgatgggcggcggctatcacaccggcaactggagtgcggttgcggaattcaatatcaaaattgatcccgaagcggcacatattgtgtttaacgcgggctggccgctcaccatggtgggactggatctgacacaccaggcgctggcaaccccggaggttgtcagcaaaattgcggccgtcggcacagcaccggcacagtttgtcctcgaactgctggaatttttcggcaccatgtacaaaagtgcccagggatttgattacccgccggtacatgacccctgcgcggttgcgtatgtgatcgacccgtccgtgatgaccacccgcaaagtaccgctggacgtggagctgaccggcacactgactctcggtatgaccgttgccgatttccgttcgccggctccggcggattgcccgacacaggtggcggtaaaactggatcacacccgcttctgggatctggtcactgatgccctgcgccggatcggggatatccgggtcgcataacccttctgatgtgccggttcgccggcacaatacataaagtaatctgatcggtaaccaacctgacattacagcgcaaatcatcaaaaatattattcatatttacttacattatgtatcaattaatcataagcaaaaaattaataaatgaaaccctaaaatcacatcaatagttaaatgttttattctgaaatgaactattattacagcgttcgaacaaattcttattggtgatttgtctgtgtcgattcaaattacaagcaataagccaaaaaaggaggcagccgcctccttttttactgcctggagaaaagtgaaataataactcacacgattaaaaggttttcaaaagtgattatttcactgattttcagatataaaaaaaggaggctttcgcctcctttttcattatacgttctctgaattaaatcagaactggtaaactaaacctaagcccagtacgttgtcggtgttgataccggcagaacgggtgaagtcgttttcgtctaacaggttaattttgtagtcgatcagagcagacatgtttttgttgaagtagtagtaagcacctaaatcaacatatttcaccagatcctggtcgtcgccgtaagcgctgttcaggctcttacctttagactgcaggtaagcgatggacggacgcagaccgaaatcgaactgatactgagccactaactcgatgttctgagttttgttagcagtttttgctgcgtcgttatcgttgttaccgtagtgagtcatgttacgggtttcgccgtaaacagctgccaggtacaggttgttagcgtcgtatttagcaccgaagttccatgcttctgcacggtcacccagagcgccgcttgccaggttttctttctgaccctgcggacgtgcggagcttgaatatgcaccaccaacactcacaccccagccgatgtcatacgcggtggagaaaccgaaaccgtcaccgttagcagtgttgtcgtagctgtaggtatcgttgattgtgtcgtgagaaccacggttagcgatagagttatcgtcgttcgcgccctgatactgtaatgcaaagctcaggccgtcaacgtaaccgaagaaatcagagttacggtaagtcagcaggtttgcagcacgaccggtcatgtagacgtcggtctgagtcatggtgtcgttaccgaagattggcagcacatcggtccatgcgttggtgtcatagataacaccgtagttacggccgtagtccagtgaaccgaactcagcaaatttcagacctgcgtaagctaaacgaactttattatcgttttcgccttcagtgccgttagttttgatttcgttttcgaaacgaccaaagccggttaattgatcagtgatctgagtttcacctttgataccgatacggaaacgggagtcatcaccatcctggcttgaaacattcgcagggtgatcactgtcactgaataaatgacgaacatcaactttaccgtacagatccagtttattaccgtctttgttataaatctctgccgcgtttgcagcgccgcttaatgcaacgagcgggactaatacagctaataatgtctttttcattttatattcctattatattaaccactactctctgaccctatttacacagagccttgtagattattcaccctgaaagttcatattacaacacgatctcagccccgattggcgctaaatagcaatatatgtcaaaaaaagcacttattgcatggataatgtgacaaatagtttcaaaaccaaagcatttattgttaaacagcaataagataaagcgcacgaatcgctaattctgatattaacattggtgatagccgttatatttgattattaacgtcatcgttaaaataatacgaataaatcattcaaaaattttaaattaaaaccggatgaaaacaaataaaaaagccggtttgttttacataaaccggctttcggggaaaagacatcagattaatttatgtcatatccggtaatgatgcttatccagcccgtactttttcatccgcagatagagtttcttacgcgggatttgcagatactctgagacatcgttaatccgtccctgatggatattcagggcttcagtgataatctgccgctcatagctctccacccgctgatcgagcgcggtcggtgccacggacggcagcagcgggttcgcggtatcgcccatcggcataatcccgaccgcatacagctccgccgcgttcgccagttcactgacattgcccggccagtgccggcgggtgagttttttcaccagcggctccgcaaggttcggcagcggatgattcagacgggaacaggcctgttccagataataacggaatatcggtgcaatatcggctttgcgctgggacagtggcaggcaggcaatctgtgtcatggagaaacagtaatagagctcagcgataatcttctgctgtttggtcagcataatcagcggcgtgtcggcaatcccgatcagacggaatgtccgctgctcctgacggatatgctgtaccagccagcgctgctggctgagcggcatcagatcgatatttttgatcaccagtgtgccgtcagtcacttcatccagccaggtatccagcgggatctcctcatcactgagcagggttttgatgaccagcggcccgcgtttattgctgcttatctgatgcaggtagcgcgccagataggtacggccgctccccggctcaccgtgcagaaagaccgcagcacgggtttccgccagtccgcgcagctgctggcggacgtgctctgtccattcactctcaccggcaagattcagtgtcagctgctctgagctccagcggcgctgagttacccgttgtttgcgggctgcgagggctttttctgtcagggtcagcagatgctccggatccaccggtttctgcagaaaatcccacgccccctgtttgacggcttccaccgccatcggcacatcaccgtggccggtgatcagcagcaccggcagatatttgtctttttccaggaacaatgccatcagatcgataccggaacaccccggcatacagacgtcactgagcacaataccgcaccagtcgcggtgaaccagctcttttgccgccagcgggtcatgacaggcataaacacgatatccggcctgctccagcagcatacagtaagcttccaggacatccgtatcatcatctattaataagatatcgtagttatcatcaagcatattgagttacctttttaaaactcaggatcacacatccgtggcgggtcagcgtggatgcgatccgcaggctgccgcccagctgctgcataatcgaactgctgacagacaggccgatcccgaggccgatttccttactggtggtgaagggtttcatcagtgagtccgccagcgccatcggccagccgcagccgttatcactgataaagagagaaatctcatcagcggactccgtaaaatcaatcacaatttcagccgctgccggtgaggcatccagcgcattggagagcatattgaccagcacctgctgtataccgatggtatccccctgcacctgcggcagaaagtccggctgatgcagggtgacatcgcgcattttgttctgtaatgcgaggatatcccacgcatcctgaatgctctgatgcaaatcaatcggctgcagtgtcgcgccgtcatcccgccgccgggcaaactggcgcagagagcggataataccgtccatccgggtaataagctgtgcggatttattcagggcattcacggcattggtatttccttccgccgccagtgcccgcttcgccatataaacgtgcatggataatgcattcagcggctgattgatttcatgcgccagggtggtcatggtctgtccgaccacggccagttttgccgtctggatcagctcattttgtgtagcccgcagattggcctcaatggcttttctgtcggtaatttcctgttccagctgcgctttctgccggttgatctggctgagtgtctggcgcagcagcatggccacccggccgatttcatcgcgcccctcaaccgggatctccgcggtcagatcaccgtgtcctatccgtgcaactgcctgattcagcactgtaaagcgtttgaccagccgggtgcggataaaatagtggttaaatatcactgccagtaataacgccaacagcgcagtaataataatgataatgccgctgtaactcataatgccggacagatggtgattcagagactgtaactggctgtggctgttatcaagctgcacatcgagctgtgtgcggaaccgctccagaatgcgatctttttctgccgtggcagccgccagctccgctttcgccgcacggtaatctttcagcacgccgggcattttgctgtcagacagaccgatatccagcagttcatcaatagtctggcgcagtgtcacggtgctcggatacatgtccagcgccgtttcgtttgattccgcaccggacttcagataggaaagataacggacataactgtgcgaatctgcgctgctttccgtactttcattctgttcatcccgcagacgcccggtcagatcatccataatctgcccctccagccgtgcaagggtataaatcagctgtaactccccctgcactttgcgcagactgccctgcagggcgatagcccgggacggatcctgctctgtctgatccagcagagagccctgctgccagctgatatcctgtgacagcgagctgagttcggtactgaaatcgtcatgcagccaggcaatccgcgcggacagcgtattcacattctcccgcgccagaaacagggtatacagggcattgtcgagacgctgcaaaagcgcctgtccctgctgcacaatcgcggcgatctgtacctgatcctcgccgctcagtttccggttgatcgcttcgatctgtgataaatgaagcgtgatctgattacgcaactgcagacgtgctgcggtatccggcgctttcaggaactcattcagctcatccaccagcgtgttcagttgtccctcgatcagaaacgacgcctgaatacgcggaaaataatcccccagcgcgtagcggatctgccggttctgcgcctgccaggcgtacaggctcacgcaactgacgatcagtgtcatcagtgtgccgataacaaacgcgccacgcaggatcgcgctgatactgaaacggccgatataacgggcaatacgctgtttcaccggactttctccagttccgcaatcgctttgcgctgttgctcgcggaagaactgctgccagcggatatactcttcctccgctttgcggttatcgtcaaaacgtgagtaataggccgggtcggcactctcctgcgcagagaccggcatggcagtcagcagggcacggatatgcggcagcggacgtttcacgcgggcttcggcggtatacagggcacgccaggcgtcgatggattccgtcagacggaaggtgatcgcggtatcaaacagctgctgtaccatacgctggcgtttgagcaccagattctcatccatctgatgcggggaattcagcagacgccgctgcaccggctcacgcggatttccctgcggcagcggtgtgaccggatatttaccggtgctgctgtccgccagcacgttctgcccctgttcactgagcaaaaaacggataaaggcgcgggccttgtctttattcaggctgtgacggcttatcgcgacgaaggtcggggatgtcgcggaatccggcagataattaaaggccagctccggatcacccagcagcagccaggcgtagttatcaatcaccggcgcggcaccgcccagcccggctttgattttgtccgccaccccgaaactgcgtgacgagatagtcgccagattcccggaaacattgagcagcagcgcccagccctcatcccagccgcgctgctgtaacagcgattcgaccatcagatgataggtgtccgagcgtgacgggctgctcatcagcagcaacccctgatagcggctgtcggtcagggaatcccacgatgccggaaccggcagattattttccgccatccgccgtttattcaccagaatgccgtaaccggaaaatgccaccgctgccgcattatcgcgcagccgcagcggcaccagacgccgggagacctccggcagatccgggagttccgccagccggtcatgctcctgcagatgctgtaataacatcggcgaggatgtcaccaccagatccacatcttccagtgcaggggtatccagcagacgctccagtgccgcactggtacggttaatggtacggatacggacagcaccgggctgctgctgccagctgctgataatatgggcggttgcttccggtgaaaacgtggtggcgatcaccagttcatccggtttcgccgtggctgacagactgaacatcagtgcggcggcggttatcatactggccgcaaagcggcggattcggcgttgtgacataagctgggttctgtattcgtttgcggggtgtgattcacatcataaaaatgacatctttttcagtttgtcgcaaaagtccgtttgagacaaatattacccgtttgtttaccggcatccgcatcgcggatattaaattaaataacaaacaggaacggtaaatggcctgatattttaagttatcgccacaaacagataataacaatgcaggaaacaataatagcaataaatcatcgcaacaacaaaataagaataaaaaccttaaagttcaatataaaagctgttaattcatttttacttatcatttgttttattcattttttctttcatttcatggtgatacaaaataaacatataaataaacttatttgtgtcagtttatgccttttatatttaatattgagtcaaaactgactcaaaatcatgatattgagatatttattcagccggaacatgataaccctgtcagaaaaaaaacgaccatacacacagtaatcctattttaaaatacatttctgcaggtgaaattatgctgtcatttttaaagccggctatggcaaaaaataaagtagcacccggaaaagtgcccgccacttacaaacgttatcgtgttcaggcattgctcagcgtgttcctcggttacttagcgtattatattgtccgcaataactttacgctctccacaccgtatctgaaagaaaacctcgatctgaccacaacgcagatcggtatgttaaccagctgcatgctgatcacttacgggatcagtaaaggaatcatgagcagcctggcggataaagccagtccgaaagcctttatggcctttggtctgatcctctgtgccgttgttaacctcggtatgggcttcagcagcgcgttctggctgttcgtcggcttcgtggccctcaacggtctgttccagggcatgggcgtcggtccttcttttattactatcgccaaatggttcccgcgccgtgaacgcggccgtatcggagctttctggaatatctcccacaacgtcggcggcggtatcgttgcaccaatcgtgggtgcggctttcgcggttctcggtactgagcactggcagacggcaagctacgcggttcctgcggttatcgccgtggtcttcgctgtgatcgtcctgctgctgggtaaaggttctccggaacaggaaggcttaccggcactggcagaaatgatgccggaagaaaaagtggtgttatctgatgcgcagaaagagcagtctccggaaaatatgtctgcatttcagattttctgcacctatgtgctgaaaaacaaaaacgcctggtatgtctcttttgttgacgtgttcgtgtacatggttcgtttcgggatcatcagctggctgccgatttacctgctgaccgagaaaaacttcagcaaagatcagatgagtgtggccttcctgttcttcgaatgggctgcgattccgtccaccctgctggcaggctggctgacagacaaactgttcaaaggccgcagaatgccgctggcgatcgtctgtatgaccctgattttcttctgcctgatcggttactggcagagccagtccctggccgtcgtcaccttcttcgctgcggttgtcggttgcctgatttatgtgcctcagttcctggcatctgtgcagaccatggaaatcgtcccgagcttcgcagtcggttctgcggtaggtttacgcggtttcatgagctacatcctgggtgcaaccctgggtaccaccctgttcggtttcattgttgaccgtatgggctggcacggcggtttctatctgctgttaggcggtatcgtctgctgcatcatcttctgtattctgtctcactttggtgcgctggaactggaacgtaaccgtcagcaggcactgtcagaagagaaagaaacaaaaattaaattagaacctgcttctgcaaactgatttcacactgttcgttaccctttcgcgccgcggcgctgacatcaggaacgttattgataaaaaaatccccctgtggcaacacagggggatctttatctcagcggttcagcttatttccactggtatttcactccgatcatcgcacggtcaccggagtaatcatccgcgcccatctgatgggaaacgttaccccagactgtccagtttggtgaaatctgcccttccacaccggccttgatttcaacccggttcgccggacgatcatcactgaaggtgtagtgtttattaaaggtcatatcactcttcgccgtactgtgcagccagttcacctcaacaaacggctgcgcggatttatctgactgcttctggtttgcgtaggtcagacgggcacccagacgggtatccacactgttactgcgcccgcccttcatcaccagaccggttccgctgctgctgtcatcagaatcatacgaattaaagataacctgcgcctgcggtgttaacagccactgtttatccgcatccggtttgtacaccgccatgctgtagccggtttcaacagaagcactgactaagcggctcttataatccgatgaactgccggccatggagactttattatcaaaccaggaatactgtgcccagacatccgcataggcattgttttcatcttcgcggttctgataccaggtgccgtataaaccgacgctgtaagcacgatcaatttttgcatcggctttcgtaccggtccgtttggcgctgctggtgtaatcagacttaccgattgcccccatgataccgccgcggatcgtggtgtcctgggcatcattgttccagttgataatatcgccgcccagctgggtggtgtaggtatctcctttcagacgcagtgaacggctgaccgcatcctgacgctgacgatccccggtgatgcgcagccagacagaagaggcgttttcatcccctttaaagctgtcggcatagtgcggctcgcccagacgatcatgcagggtcatggaaaacatgcccagcgctgccgtgcggttagccatgtgtccgccgatttccgggttcacgttacggttcggatcttccttgttttcatccggcggatagacattggtatcgaaagagtcgagataccagctgtcatctttataccctttgtgtaacaggtattcgtataccccgatagcaaccggcccgcccagtttaaaggcatttttatcggattttccgccgacatgaaccactttaatggcatccggctgtttcagggtatctgcaccttcgccaccaacattattaatgttcagcgtggtcgcgccgtttttcccggtgtacacattaccgtcaaccaccagttggtcagtcattgtgtcttcgtggcctctgttcagcacggtattcagtgtgatcgaacccccgttcgcagtgaaatccccgccgacattcagacggctttcggtctctttctgactcgcaagccagatgctgccgccgttgttgacaaagttgccgtcaacgcggtaatccgttgcctgtcccagatctttcttatccaattcaccgacatagaactgaccggcgttattcacgctgcctttcagtgtgccctgaccggcaaatgttccctgagtgccgatattcacctgacggctgttcatcaccagcgcggaatcatagctccccgcctgtaatgtgccgttctgaatctctgttacaccggtgtactgcgccgatttatctgtcagcgtgatacggcccgccccctgtttcaccagtgtccctgtcccggtgacactgttggtcagatcccacggctgtttgccgtcattgtgcgtcagcaccagcgtaccggcgttttcgatcgccgc

SEQ ID NO: 45 - DNA, 140356 bp, unknown
  Altogen 322075 strain
  misc_feature (91067)..(91114): n is a, c, g, or t
  misc_feature (114388)..(114477): n is a, c, g, or t
  misc_feature (128697)..(128801): n is a, c, g, or t
  misc_feature (132655)..(132655): n is a, c, g, or t
gcggcagccgccgccggagcagccggtgcggcagcctgagctgccggagcaggagccgctgctgcggcctctgcttcaaataccatgatgaaagagccggtgctgactttatcgcccacagccactttaatttctttaacaacccctgcctgcggagacggaacttccatcgacgccttgtcaccttcaacggtgatgagtgattgttctgcttctactttatcgccgacactgaccagaatttctgttacatcaacttcatctgaaccgatatcgggcacatggatttcaatagacattaatttttacctcttatgccacacgcgggttaactttttcagggttgatgctgaatttcttaatggcttcttcaaccactttcacgtcaacttcaccacgtttagccagctcacccagagcagcaacaacaacataaccggcatcgatttcgaaatgatgacgcaggttatcacggctgtctgaacggccgtaaccgtcagtacccagtacacggtactggtcagcaggaacgtaaccgcgaacctgttctgcgaacagtttcatccagtcagtggatgccacagcaggtgcatcgttcatcacctgagtgatgtaaggcacacgcggggtttctgacggatgcagcatgttccagcggtcacaatcctgaccttcacgggccagttcggtgaacgaggttacgctgtagatatcagagctgataccgtactcagaagacagaatctgacctgcttcacgcacgtgacgcagaatcgcacctgaacccagtaactgtaccttgcctttatcaccggtcagggtttcgagcttgtagatacctttacggataccttcctcaacaccttccggcattgcaggcatgtggtagttttcgttcagcgtggtgatgtagtagtaaatgttttcctgcgcttcaccatacatacgctccagaccatcctgcatgatgaccgcaacttcgtacgcgaatgacgggtcataagacaggcagttagggatagtcagagactgaatgtggctgtggccgtcttcgtgctgcagaccttcaccgttcagggtggtacggcctgaagtaccgccgatcaggaagccgcgtgcctgctggtcgcctgccatccacatcaggtcaccgatacgctggaaaccgaacattgagtagtagatgtagaacggaatcatcggcaggttgttggtgctgtaagaagtcgcagctgccagccaggatgcgcctgcacccagttcgttgataccttcctgcaggatctgacctttcacatcttcacggtagtaagcaacctgctcacggtcctgcggggtatacagctgacctttggagttgtagataccgatctgacggaacagaccttccataccgaatgtacgcgcttcatcagcaatgattggcacgatgcgttctttgatggatttgtttttcagcatcacgttcagtgcacgcacaaacgcgatagtggtggagatttctttgctctgctcttccagtaactggctgaaatcgctcagtgcaggaatatccagtttctcatcgaaatgagaacggcgtgaaggaaccggaccatgcagtgcagcacggcgttccatcatgtatttctgctcttcagagttttcgtcaaacttgatgaacggcagtttttccagttgatcatcagccacatcgatattgaaacgatcacggagatggcgcacgccttccatgttcattttcttaacctggtgagcgatgtttttaccttcagcggtatcacccataccataacctttaacggtctgggccaggatcagtgtaggtttgcctttggtgtcatgcgcttttttcagtgcagcgaacattttcttcggatcgtgaccaccgcggttcagtgcgaagatctgctcatcagtccagtctttgactaatgcagcagtttccggatagcggttgaagaagtgttcacggacgtaagcaccgtctttggatttgaatgtctgatagtcgccgtcaacggtttcgttcatcagttggatcagtttaccgctggtatctttcttcagcagttcatcccagcggccgccccacatgactttgattacctgccagccggcaccggcgaacataccttccatttcgttaacgattttaccgttaccgtttacagggccgtcaagacgctgcaggttacagttgataacgaagatcaggttgtccaggctttcgcggacagcgatattgattgcacctttagattccggctcatccatctcgccatcacccaggaaggcataaacggtttgctcagaagtgtctttcaggccacggtgttccagatatttcaggaacttagcctgatagatagctgccagcggccccagacccatagaaacggtcgggaactgccagaagttaggcatcagtttagggtgcggataagaaggcagacctttgccgccgatttcctgacggaaattattcagttgctcttcggtcagacgaccttccatgaatgcgcgtgcgtagtagcccgggcttaagtggccctggaaataaataacatcaccgccgtctttttcgttctgcgcacggaagaagtggttgaagcacacttcatacatggtagccgcagactggtaagatgccatgtgaccgcccagatccagatctttcttggatgcgcgcagaaccatcatgaccgcgttccagcggatagcagaacggatacgacgttccagctccaggttgcccgggtaggcaggttcatcctcaacaggaatggtgttgatatagttacgggccgcagcacctgctgcaacactcacaccaccctgacgggcagtattcagaacctgatcaatcaggaactgtgcacgctcaacaccttcttcacggatgcccgattcgatcgcctgtagccagtcgcgggtttcgatcggatccacgtcattgttcaaaatgtctgacatggtgtattccttatagtttatctgtttctaatgatattcggagcctatcttcacgtatcccgtcttaacggtggcgggcgacgtgaagataggcccggctatatattgccgctgatgcataggtcagcttacagacgcagcattcagggatctgtaagccccaaaaccattactgatttattctgtatactgctggagacggcgcagtgaacgttcccggcgggtgtgttcacggctcatatccagcaatacgtcttccaggaatgccagatggcggtgcgatgcttcccgcgcaacctccggcgaccggctcataatggcccggaatacctgttcccggtgctcgctgaccatcgccagcatctctttccgggtatataagaattcaaagttctgccggatatttttttccagcatcggcaccatacagcgcagcaaatgtaacagcaccacattatgtgcggcttctgtgacaatcagctgatattgcaggacagcctgagattcggcttccacatccccggcgtcgcgggcatcggcaatcgcctgatggctgttggtgatacggacaaaatccgcttcggttccccgcagtgcggcataataggcagcaataccctcgagggcatgacgggtttccagcagatcaaactgagattcgggatgcccttccagcagctgggccagcgggtcactgaagctttgccagagattgctctgtacaaatgtgccgccaccttgtctgcgcagcagaaagcctttcgcttcaagtttttgaattgcttcgcgcagtgagggacgtgagacgtcgaactgtttggccagctcgcgttcaggcggcagcttctcccccgggctcagagtgccgtcgaggattaagtgttccagccgctgctcgatcacgtcggctaattttggttggcggattttgctgtaagccatatttgcatcagaaccatcaacatggataaatattgcttcatgggttttgtagtcaattggtaataccaatttcttttacagggtcttaaagtaacaaagtattcaccaactgtctataaagaccttgagctaaatcataaaaaccagcaagttttaacaattttttttaaattttagcataaattgataactgatacgtttaaatgctgcatcgtgaatgttacaggatttaacgtttaaaattcagataaatacgcaaactgaaccgttacagtgaccagatcgacggataaataatcattttttgtgcattttcaccgcatcttattgatgattttccgcttcacagagcccggacagattgtttccgctgtaacgatactcaccagacgcatttaatcagtaacaggttaccggaatgctaattctagcagggaaccggtaaacaggaaaatttcacgtcagtcatatctgcgtaattttactgattattcagccggaacgtctgccggattcagtgaattcctgtatcggttccagtcgaaacagggaccgggatccgttttgcgccccggtgcaatatcactgtgcccggtgatatgcccgtttatttgcggatagtgcgccagaagcacccgtgtcaccgcagtcagtgcgcggtactgttcatccgtaaaaggtcgggtatccgtgccttccaactcaataccgacagaaaaatcattacacttttcggtgccctgataacaggaaacacccgcatgccaggcccgtgcatcaaaaggcacatactgcacaatttccccggtccggcggatcaggcaatgtgcggaaacccgcagtgcctgtatttcagcaaaaaacggatgcgcatccgggtccagcgtgccctgaaaaagctggtcaatatacggaccaccgaactgtcccggcggcagactgatattgtggatcaccagtaaacggggagtcacctgttccggccgggtatcgtgatgcggtgaaatcacccggcgcgctgtggtcagccagccatcctgaatatccattcgttctcctgagcaaaaaaccgttattcaatcacataacaaatatcattttgtgccgcacagtatacgtgtcttcccccctttccggggagtactgatttttcacggctgatttttgcgtgtcagaccgaaaaaaaatctgcatttctcaaatgttacaccgcagttttccatctgtgccgagaaatccggagacctctcttttttgccgatccgtcattgaataaagtgcatcacgctaaataagtacctctttcacagacacaaaaaggagcatctgtatgaaccagcgcggattcacattaatcgaggtgatggtggtggttgccattgtggccgttctcagtgccatcgccgttcccggctatcagaactatatccggaaggcagcactgattgacgtgctgcgcacggttaccgcgtttaaaaccggcgtggaactgtgcagttttgataatccctcttttgcaggatgcaacagcgggtcgggcaccattccggctgatactccggggcgctacatcaaatctgtcaaagcggaaaacggtgttgtgacagtacagggagacagttcactggctgcactgacagtcagcaccaccccggtaagaaatccgcttaacggcatcactgtctggacaaccgactgtaacagcgaagaagacgcactgaaaaaaatctgtcttgacgtcatcaagtaactactgacatgaaaaggaattcattatgcaaacagcagcacccgcccctgtcacccgtaccggcgggggagaacaactcttactggctgaagttcatgccctttgtgagcgcaatgaactgatgctgattgactataaccccgatgccgtcagagttgctgccgcacagcagccgcgcagagatattgtgtctgctatccggtttctggccggtaagcgggtggacattgaattgtggcacagtgaaaaactggcctactgccgccgcaataccccgctgccggagccggtccttttccccggtgtaacaccggagacaaacacgccggtctctgcggataccggcaataactgtacaggcaccggttcaccaccgctgccgcctgccccgcctccggtgcaggatcccctccgggcgcctgagaccgatacctggccggcagaacagcaatccgccgctgtcagatttgttaaccagctgattgcgggtgccattgccaaacgggcctccgatattcacattgaaccggcacaacagggttaccggatccgagccagaatcgacgggcaactgcatacgctgaattcaccgccaccagaaatcagtagtgagataattatccgcatcaaaatcatttccggcctcgatattgccgaaaaacggttaccccaggacgggcagtttgagtggctggaaaataacacccgctatgctgtccgtgttgccacactaccaacaatttatggtgagaaagtcgtgctgcgcctgctgagcaccacacagaatctggcactggaaaaatccgggctgacggccgggcagttggaaacgctgcatacagggctcggcagtgccaccggtattatcttgctcaccggccccaccggcagcggaaaaaccgccacactctacggctgcctgcagtacctgaatcagaataaccggaatatctgcagtgttgaggatccggtggaaatcccgctgcgggggatcacccagacccagataaacccgaagattgagctgggcttcgccgccatcctgcgggctctgctgcgtcaggatcctgatgtcattatggtgggggaaatccgggataaacccaccgctgagatggcaatcaaagccgctcataccggtcacctggtgctgtccaccctgcatacaaactctgcggaggatacgttttcacggctgaggcaactgggtattgatgaatacttcatgaaaacctgcatcaaactgattattgcgcagcgcctggtccgcctgctgtgtccgcactgtaaaacgcagaaacagaaaacagaaaccgtgatactgagctgcggaaaaacacatcagttcaccccgtggcaggcaaacggctgtgatcactgcttttcaggctattacgggcgtaccgcctgctttgcatttctcactccgcaacacatccagcctcccgcatccggtgaattacccggttcgctgtttgatgccggtatcgcactggcggaatcaggggtaaccacactcagtgagatttaccatatgcaggatatttaacatccgctgaccaacaggagtgatgctatgcaaatttaccggttgtatgactggtccggtctgacacccgctgacaaggtggtgaccggaacgcttatttcaccttcagagaataatgctgtcagtcagctgatttcgcagagcatcacacctgtatcactgttttgccgcaaacggccggtctgctcacaaaaagaaaaacagtatctgctgcgctttacccggcaactgacaacattactgacgtcggggctgccgttactgaaagcgctcacactactggcgggtgaatgcagtcacccactctgggaagaagtcatccgtgctcttatcaggcaacttcagcagggaaaaacatttactcagggaataatgcagtatcccggtttatttgatgccttttattgtcagatgaccaccgtcggggaggaaaccggcaaattaccggagtgtcttcacacgattgcacagcatattgagagcaaccgggatcaccggaccgcattaattaaatcaatccgctatcccgttgcattgttagttgtctgctttctgatgatcacattaatgtttctgtttgttattcctgaattcgcaaaaatatatacctcattcggtgcggagcttccggctctgacacaatggctgatccgggtttctggtgttattaccggttacacaatcccggaaatgggtataataactgcaattatatttatttatcatgtatttcggcgaagacatccggatataaaaaaaacagaatcaatctgtattctgcgtattccgtttatcggaaacattattatcttcagctgtgtctctcatattttccggatactggcaataacacaacaatcaggcattacacttatttcgggtattaatacacttattatgacaacaacacatccgttatataaagaggcattaactgtgatacgggaggacttgcttcacgggaaaacattcagtgaatcaattaaacaatccgggttattcccatccctgtgccatgagctgattgccaccggtgaagccaccgggaaattcggacacttttttctctataccgcagactggtttaaatctctcgccttaaaccaaattcagacattttttaaaatactccagccggtactgtttatcctgctggcaattcttgttgctgttttattaattgcaatgtatttacctttattccggctcggtgaagttttagtctgataaaactattcataatttaaagaaacagattaaaaaaattcaaacctgtgaaatatctctgtattcatcgcttatttgccataggcgaaattaatttcatcaggtacaatttacccgttgtttcgatcaggacagaaatacaatggcttatattgttgcgttaaccggaggtatcggcagcggaaaaagtaccgttgcggatatgtttgcccgtctcggggttcctgtgacagatgcggatattattgcccgtcaggtggttgaaccgggaacgcccgcattgcaggctattgccgatcacttcggtacccggattctggctgcagacggcacactggacagagcagcactgcgccgggagatctttgcagaccccgcggaaaaaacctggctcaatcagttactgcatccgcttatccatcaggaaacccggcgccagctgaacaatatcactgccccttatgccctttgggtggttcctcttctggttgaaaataaccttgcttcccttgcggatcgcgtgctggttgtggatgttcatccgcacgaacaagtcgcccggacaatgcgccgtgacggcgtttccgctgagcatgccgaaaatattctgcgggcgcaggcatcccgtgaacaacgtctggccgttgccgatgatatcctgacaaatcatgataacgatgagccgctgatgccccgcgtccttgcactgcacgaactttatacagcattggcccgtcagccaaaacaggaacacccatgagcgaaatccgtcagtctgttatttttgaacaccctttaaacgaacgaacccgttcatggctgcgcattgaaacatcacttcagcaaatgagtacgctctccccgctggactctctgccgtccagcctggcattcttccgggccgtcgcggaatttattgaagtgattgatcgcggtgaagtccgttcggaaattttaaaagagctggaaaagcagcaaaaaaaactggccatgtgggcagaagcccccaatgctgaccaggcactgatccgggggttttctgacgaactgaaacaaaaggccgctgaactgagcaaagcgccccgcatcgcccagcacctgaaagaagataaaataatcgctatcgtccgtcagcggctgagtattccgggcggatgctgcgggtttgatctgccttaccttcatctgtggctgaatctgccgcagagtgtccgtgataccacgcaggccgcctggattgaaggtttgcagccgctgcaaaatgcactcggcagcctgctgaccctgctgcgtcagtccgcaccatttgttgcggctgaaagccacaacggtttttatcaggataatgcggaaggtgcggatttactgcgtctgcgcctgccggttgattttcagatttacccgcaggtctccggccataaaacacgttttgccatacgcttcctgcatactgacagcgaacacggtataataccgactactttaccgtttgaaattgcctgttgctaacagggaggatgttatgtcagaagctattatcgttaactgtccgaattgcaaaaaagaggttgtctgggggccggaaagtccgtaccgcccgttttgcagtaaacgttgtcagttgattgatctcggggagtgggctgcggaagaaaaacggattgccagccagagtgacctttctgacagtgaagcctggagtgaaccggaagacagttcaccgtactgattaatccggcggcggctgaattaaaacagccgccgccgtacctctgaatcttactctgtcagcaatgccacaattccccggttgaccggcgggaactcctcagcaatcagtgctgtttgttttacccagcgggatggctgaccttcgcgaccatacggcgcattctgccactcttccaccaggaagaaataaatggtgatcaggcgatcaggaaattcatgttctgccgtctgcaacagtccgcccggaaccgccacaatacccagctcttcttccagctcccgcaccagcgcctgctccggtgactctccggcttccagcttgccgccgggaaactcccagtaaccgcccatatgagatttcagcggacgctgagcaataaatatctcaccttctgcattacggataacgccggcagcaatacgtaagtgttttttttccatcatgttctgtccgttttatttacagaagaaaggcgggtttccccgcctttttactttattatgctaatcgtctgtcaggactgattatttcagtgcaccgtggcactgcttgtatttcttaccggaaccgcaagggcacggatcgttacggccgactttacggacaccggacgccatttccgcttctgttttggtcatcagcgcggcattgtcattttcatggctgagctgctggcgctgtgccagacgttcagcttcctcacgacgacgctgctccagtgcttccacttcttccggcatgcggacctgaactttggaaatggtgctgaccacttcatatttcaggccttccagcatgttagcaaacatggagaaagattcacgcttgtattcctgcttcggatctttctgtgcgtaaccgcgcagatggatgccctgacgcaggtaatccattgctgccaggtgctctttccacagggtgtccagggtctgcagcatcacgcctttctcgaagtgacgcatcatttcagcgccgacaatctcttctttggctttgtaaacttcgactgctttatcaaggatgcgctcacgcagggtttcttcgtgcagttcaggctctttatccagccactctttgattggcagatgtaagtcgaaatcctgttccagacgtttttccagccccgggatatcccacatttcttccagagactgcggcggaatgtgtgcatcgataactgttgtgaatacgtcaccacggatgctgtcgatagtttcgctgatatccccgttatccagcagatcattacgctgggtatagatagcgcggcgctggtcgtttgccacatcatcgtattccagcagctgtttacggatatcaaagttgcggctttccactttacgctgtgcgttggcaatcgctttggttacccacggatgctcaatcgcctcaccttctttcatacccagtttgcgcatcatgccggtaacacggtcagaggcgaaaatacgcatcagcgcatcttccattgacaggtagaagcgggaagaaccggcatcaccctgacggcctgaacgaccacgtaactggttatcaatacggcgggattcatgacgctcagtaccgatgatatgcaggccgcctgctgccagaacggcatcgtgacgctcctgccatgcagcttttgccgcagcgatattctcttctgtcggctcgtccagcgccgcccgatccgcctgtaagctgccgcccggcacgatatccgtaccacgccccgccatgttggtggcgatagtcacgtgaccggaacgacccgcctgttcaacgatatccgcttccatggcgtggaatttggcgttcagtacgctgtgttcaattttggcttttttcagtgcgttggagataagctctgatttctcgatagagatagtacccaccagcaccggttgtccggctgcggtacgctcacggatatcttcaatgatggcattgaatttatcagcttctgtcatataaaccagatccggtaaatctttacggatcatcggacggttagtcgggataacaatggtatcgagtttataaattgaactgaattcaaacgcttccgtatccgctgtaccggtcatcccggccagtttggtgtataaacggaagtagttctggaaagtgatggaagccagtgtctggttttcattctggatttccacaccttctttggcttccactgcctgatgcagaccatcagaccagcggcggccctgcatggtacggccggtgtgctcatcgacgatgataacctcaccttcgctgacgatataatccacatcacggacaaacagggagtgcgcacgcagacccgccataacgtggtgcatcagcatgatattggatggtgagtacagtgattcaccttcattcatcagacccgcttcagacagcagctcttccaccagcaccagaccacgctcggtcagtgtgacctggcgggttttctcatccacagagaagtgaccttcacctttgaaagtatcggaatcttctttttcctgacggaccagacgcgggatcagtttatccactttcatgtacagctcagagctgtcttctgccggaccggagataatcagcggggtacgggcttcatcgattaagatggagtcgacctcatccaccagcgcgtagtgcagtttgcgctgtacacgctcttccgggctgaacgccatgttgtcacgcagatagtcaaaaccgtattcgttgttggtaccgtaggtgatatccgcagcatacgcttcgcgcttagccggtgcaggcatgcccggcaggttgataccgacggtcataccgaggaattcaaacagcggacggttgttttcggcgtcacgctgggcgaggtagtcgttcactgtcactacgtgaacccctttgccggacagggcgttgaggtaagcaggcagtgttgcggtcagggttttaccttcacctgtacgcatctccgcgatgcagcgttcgttcagcaccatgccgccgatcagctggacatcaaagtgacgcataccaaatacacgtttactggcttcacgtaccgtggcgaacgcttccggtaagatatcctgctcggattcacctttggccaggcgatcacggaattcctgtgttttggcttttaattcatcatcactgagtttttcgaactcaggttccatccggttgatagcttccacggatttgcgcaggcggcgtaaagtacggtcattccggctgccgaagattttggtcagtaattttaccagcataataaacgtctctgttcaggcacaatcaggccttgttaataatcaatgtgttaataatttttttggggaactacgctgattgtgcgggaccggcacggatgccgccggtgcgggcaatccactgaaccgaaaaagacggagacgggttaacggcagcaatacgctgcggcagaactgccggatgataaacaggcagtgccggagagtcggtcagaatggcatacagcgccgccagcatattttgcgcggaggcatcatgccggtcttctgccggggtattatcttttgaggcatcttccggacaggaaaatgcaaaggaaatctggcggataacattacggacagcatgctgctgccagtaattaacgttctgtgaggttctcgccggctggctgctttgcaggaacaggctgtcaaaggcggataatgcctgactctggcggttttgtgttgtcccggcaccggctgtggtaacatcaccactgttcagtaccgcaggcaggccaaaaccggtcgccacaatcccgataaagagatggcaccagaaataacgcctgccaaattgccgccaaagatttaaaatagtgtttccctcacgagatccggagtatatgtgatgcgcgacagtcagccagtttcccttgaaagcctgctggaaagcgggactaaggataataatacccttaaaagtattcagcagcgtgctgtcgtgttacttaaactcaaccgcgccgttctggcgctgctgcccgcgatgctcaaaccacactgccgcgtggctaattatcgcaaacaactgttaattctggaagtctctaatgcggcacagatgacccggctgcgttacgaacttcccgcactgcgttctgcactgcgccgggagattttaccatcattatcggccatcgacatcaaaatcaatccgtcattgatgaaatcatcagcaaccgggttaccgggtggtgataaaagcagcagttcagatagcaaaaggcaaaaaacagcggagccgggacggaaattaagtgcggaaagtgccaattcactgaaagcgctggcgcagagaagcccggagaaactgaggaagaagctggagaaattggctgcactggccggagagagtaccagtgcagcagattaagcagacggttatttggtaaataacgtcagtgacaggagtgtcagggtcagagcaacaagctgtggtgccatgacctgattacgccagtacggttgacggtgcacggaatgcaaccggcatctgtgcttcgttctcgaatgtcacgagttcccaggcgctctctttagccagaacagcctgaagtaacttgttattcagtgcgtgaccggatttgaatgcggtaaaggcaccaatgatattgtggccgcacataaacaggtcaccgatagcatccagcattttgtgacggacaaattcgtcttcaaaacgcaggccatcttcattcagcacgcggtaatcatccaccacgatggcacagtcaaaacttccgcctaaacataagcctttggactggagatattcaatatcccgcatgaacccgaaggtacgtgcacggctgatatcccggacaaagttttctgcagagaagttcatcgcatagcgctgagtgctggaatcgatcgccggatggttgaaatcgatagtgaaatctaagctgaaaccgttaaacggagagagttcagcccacttatcaccatcttcaacacggacggtctctttcagacgcaggaatttcttcgcgctgctcagttcttcaataccggcatccagtaacaggaatacgaacgggcttgcgctgccgtccataatcgggatttcagcggcatcgacttcgataaccaggttatcaatgccgagtccggccagtgctgcgttcagatgctcaaccgtggaaatacgtacgttgtcttcatttaccagacaagtacataacatcgtatcacgcacggatttcgcatctgccggaaaatcgacaggcggattaagatcagtacggcgatagatgatcccggtattggccggtgccggacgcattgtcagcgtaacttttttgccggtgtgtaaacctacacccgtagcctgaacaatacgctttaatgttctttgtttgatcatcgtttctgtctcgtttgattaactgtctccctgtcattataaactaatgacaagggagatagtttagcacaaaaagcggagatgcaaatcttttcggtttaatcagcctgtttgcgtaagaaagccgggatatctaaataatccggttctttattgctctgggctgaagaatcgttgacaacctgtgccactgatttgctctcatccatgctggtcatgctgttttgcatttgtgcataacgatgttccatgttgttggtctgcaccgctttattggttaccagcgtgatttcaggacgtttgtccatgccgataccggtcgcgaccacagtcacacgcagttcatcgttcatttcagggtctaaggaagtaccgataaccacggtcgcattatccgatgcaaatgcacggatagtgttacccacggtttcgaactcatccagacgcaggtcaaagcccgccgtgatgttaaccagcacaccacgcgcacctgacaggtcgatatcttccagcagcgggctggaaatcgccatttcggcggcttcttccgcacggtcttcaccgcgcgccacgccggagcccatcatcgcgtaacccatttctgacatcacggtacggacgtccgcgaagtcaacgttcatcaggcccggacgggtgatcagttctgcgataccctggactgcgccgcgtaatacgtcgttggcggcaccgaaggcatccagcagtgagatcccgcggcctaatactttcagcagtttgtcattcgggatggtgatcagtgagtcaacatgcttggataactcagtaatcccctgctcggcgaatgccatacgctttttgccttcaaaattgaacggcttggtcaccacagcaacagtcaggatgcccagctctttggcaacttcagcaacaacaggtgccgcaccggtccctgtaccgccgcccataccggctgcgataaagaccatgtccgcaccgtcgagtgcattgcgcagcgcttcgcgatcttcttccgccgcgttacggcccacttccgggtttgcacccgcacccaggcctttggtgattccgttaccaatctgaatagtctggccgacggcggttttacgaagcgcctgagcgtccgtattcacagcgaagaactcaacgccttcgatgcgttcacggaccatatgctcaacagcgttaccgccgcccccgccgacgccgatgactttaatcaccgcgtcgttggtcaattccatcggttcaaacataatctctctccgttttgtgcctttcttatatggcggctattatcgccagccttaatacaaattaaaattcttttctgagccagccagttaattttttaaaccaactgcccaccgaggcacgtttttctgtctcggtatcgccgaccaggtgagattcttttccgtaatgcagcaaccctaccgctgtagagtaatacggttcctgcgcataatccgttaagccggttatattaagcggttgtccgatacgaacctgtgtatggaaaacacgctgggcgcactcaaccagtccgttaatctgagccgcaccacctgtcagcacgataccagcggccaaatggtgtttgacaccctgctgacgtaattgttcctgtactttcaaaatttcgtcattaaccagattgagtaattcggtgtaacgcggctcaatcacttcggctaatgtctggcgctgtaaactgcgcggcggacgcccgccgacactcggcacttccagggtttcgtctttgctgaccagagaccccagcgcgcagccgtgacggactttaatcgcttccgcatcattcggcggtgtaccgaaggcgtacgcgatatcgccggtcaccacattccctgcatacgggataacccgggtgtgacgcagtgcgccgccggtgtaaatcgccatatccatggtgccgccgccgatatccacgacacagacacccagttcacgctcatcttccgtcagtaccgcgaagcttgatgccagaccggcaaaaatcagctggtccactttcagtccgcagcgctcaacggctttgacaatattctttgccatgtcgttatgacaggtgatcagatgcactttcgcctgcatccgcacaccggataatcccaccggatttttaatgccttcctggtaatcgatggcatattcctgcgggatcacatgcagaacgcggtgctcgtcgcggacacggacagatttcgccgtatgcaccacattttccacatcttcctgggtcacttcttcttctgaaatcggcaccataccgatttcattctggcagctgatatgtttgccggataacgccagatagactgatgatatctggcagtccgccatcagttccgcctggtcgatggcacgctgaacgcattttaccaccgactccaaatcattgacgccgcctttgtccattccgcgtgacgggcagttacccgcaccgataatgttcaccacaccgtccggcagaatttcaccaacaagcgcagatactttggcggtgcctatttcgaggccgacgactaattttctatccgttgctttgatcattgttattctgcccgccttctttacctgttatgtcttaatgtccgtttgcgaaaggatcgatctgcaatggcgcccagccgaccgcagcaccgctgtcatagcggagatcgacataatcaacccgtttgtcctgttcctgcgtcagggtcggatacagttcgataaaacgctgtaaccggcctttggtatccagccgtccgagttcaacccggacatcattatccagcacaagctgccaggcatgacgcggtgacattgaggctgatttgattttcagtcccgccccgctgagctgctgcgccatttcacgatacccgctcagtacatcctgttcactgccctgtgccccgtagagcatcgggaaagaatctttttctgtcagttccgccggcagactgaaaacccgcccggcgtcatcgaccatctgcgagtcattccagcgtgcatacggcacatactcgaccagatgaatttttaattcgtccggccactgcttacgcacagtgacctgacgtaaccacgggatccgttccagctgctgctgtacttcattgacatccagtgtcataaacgtgccgggcgtcccgagggataacaccgctttgcgcacattatcgtttgtcgtgtaatggcgctcaccggttaataccagttttgacatcggcaggcggtctgcatctttcatccagttcagcaccatcagaccaccccagaccagcgttcccagcaccatcaggaaaaacagcagtccggcaaggtatgtgccgttactgggacgtgaaccttcataatccgtatccggatccggttcacgcatattcagtgcagcctgtgacatatcagtccgccagtgccagaacgtccgccacaaaagcggagaagctcatgcctgcctgacgtgccgcctgcggcaccagactgtggttggtcatacccggggaagtattcacttccagcaggtagaactgtccgtcactgtcgagcatcacatccacacggccccagccttcacagcccacggctttgtaagcagcttttgccagctcacggatttctgtttcgcgtgccccttcgaggcccgggcagaaatattgtgtgtcgtcagaaatatatttggcttcgtagtcgtagaacaccgccgccggctgaatacggatagacggcagcatctgctcaccgaggaagcccacggtgaattccgggccgctcagccatttttccaccagcacgtctttgtcgtgtttaaacgcttcttccagtgccggacgcagcgcctgcgcattatccactttggacataccgacacttgaaccttccaggcttggtttgacaatcaccggataacccagcggtgccacaccctgctgtaattcttcatcgctgatgtgtgcgaaacgggctgcactgatggcgaaatacggtgcaatcggcagacctgcgcccgcccacagctgtttggtgcgcagcttgtccatagagagtgcggaggccatgacaccacttccggtgtacggcagtcccatctgctccaggcaaccctgcagtgtgccgtcttccccgccgcggccgtgcagcgcgataaagactttggtaaaaccgtcttccttcagacgggtaaccggatactctttagtatccacaccgaatgcattaataccggcttcttttaaaccggcgagcaccgccgcacctgaagccagagagacttcacgttctgcggatgtaccgcccatcagtaccgcgactttttcagtcattcttaattatcctcactcaaaaccggccgtaattttgtgtcagccaatgtacgcgctattttaccgatatttccggcgccttgaaccagtattaaatcattatcttcaagaacctgtgccagaaccgctgcaattttgcccggttcggtgaccagaatcggatccagtttgccgcgctggcggattgtgcggcacagcgaacggctgtcagcccccggaatcaccggttctccggcagcatacacatccagcatcagcaggatatcgacctgatccagcgtgttggcaaaatcatcatacaggtcacgggtacgggtgtagcggtgcggctgaaacaccatcacaatccgcttatccggccagcctgctcttgccgctttgatagtcgcatccacttcggtcgggtgatggccgtaatcgtccaccagcatcacactgccctctttctggttgacgtgctccagcgggaagttgccgaggaagtcaaaacggcgcccggtgccctggaattcacgcagagaggccaggatatcttcatccggaataccctcttctgtcgcgaccgcaatcgccgctgtggcattcagaacgttatgacggcccggtgcattcagttccacagtcagatccggcagattctcccggtgaaccgtgaagaagcactgtgagccgcgctgttcaaaatctgtgatacggacatccgcatcctcatgaaaaccgtaggtaatcacataacggccgatgcgcggcacgatttcgcggatcaccgcatcatccatgcataccacagccaggccgtagaacggcaggttgtgcaggaagttcacaaaggtgtctttcagggtttcaaaatcaccgtgataagtatccatgtgatccggctcgatattggtgaccacggccaccattggctgtaagtgcaggaaagaagcatcgctttcatccgcttccgcaatcaggtaacggcttgagccgagacgcgcatgtacgccagcagccttgaccagcccgccgttgacgaaagtcggatccagaccgccgcggccgtagataccggaaatcatcgccgtggtggtggttttgccgtgagtaccggcaatcgccacaccgtgacggaagcgcatcagttccgcgagcatttccgcgcggcggatcaccggaatacgggcttcacgcgccgcaacaatttccgggttatccgctgaaatggcggtggataccaccaccacactggcgtctgccacgttttccggacggtggttgaaataaatcgtcgcgcccaggttagtcagctgttttgttaccgcattcggcgccagatcagacccgctgatctcataaccttcgttcgccagcacttccgcaattccgcccataccggcaccgccgataccgacaaagtgaatgtgccggacacgtttcatttccggaatgaaggatcgtaatttcgccaattgctgtgtattcacgttatttcttcgctatatcaattcgttagtgtttctttgctgccgcaataattgcatccgccacccgtttggtggcatcggtaattgcgacactccgtgctttttccgccatggtcagcaggcgtggtctgtcccactcacgcaactgctctgccaccgcctgtgcattaaaggacggctgttccatgataaccgcagcgcccgcctgttccagtggctgtgcattccagtattgctggcggtctttgtgcaggaacggcacaaaaattgcgcccagcccgaccaccgcgatctcactgacggtcagcgccccggagcggcagataaccacatccgcccaggtataagcttcaaccatgtcatcaataaattctgtgactgtcacactgtctgacgcattctgcgcgttatacagctcttgtgtgctttccgcactgcctttgccggcctggtggcggatacagactgcatcccccataatcccggccacttccggcagggtctggttcaggatacgcgcgccctgactgccgccgatcaccagaatgcggatcggaccttcacgtccggcaaagcgttctgccggggacggcagattgaggatatcctcccgcaccgggttaccgaccaccggagcctgcgggaacgcgcccgggaatccctgtaatacagtggtggcgattttcgacagccagccgttggtcagcccggcaacaccgttctgttcatgcaggatcaccggaatgccgcagcgccaggcagccacgccgccgggaccggaaacaaacccgcccatgccgagcacggcatcaggctggtagtcacgcataatttttttcgcctgttttaccgctttcgcgatacggaacggcgcggtgagcagcgctttcacgcctttgccgcgcagaccggtaatctcaataaaatcaatatcaatgccgtgtttcggcacgagctgagcttccatccggtcacgggtacccagccagcggatttcccagccctgactctgtaaatagtgcgcaaccgcaagccccggaaagacatgtccgccactaccaccggccatcaccatcagacggggggctttattactcatcgcgctctccttgagaatgcctgggcttttgccaggcgtgtttcaaaatcaatccgcagcagcaaggcaatggctgtggtcataatcactaaactcgaaccgccgtaactgatcagcggcagtgtcagccctttggtcggtagcatgccggaggctgcaccgacgttaaccaaggcctggaagctgaaccagatgccgatggcacaggccagaaaaccggcaaaacgctggtcaatcatcagtgcacggcggccgataaccatggcgcggaaagcgacaaaaaagaccatcagcagcaccaggatcacaccgaaataccccagttcctcaccgaggatggcaaaaataaagtcggtatgcgcctccggcaggtattccattttctgaatggaattgcccagtccctgaccgagataatcaccgcgcccgaaggccatcagtgattgtgttaactggtaaccgctgccgaacggatcttcccacgggtcaaggaacgaggtgacacgccgcatacggtaaggttcggcgataatcagcagtaccactgccgcaacaccgccgccgataatcgcgataaactgccacattttggcaccggcgagaaaaagcagcgccagtgtggtgacaaacagcaccaccacggtaccgaggtcaggctgtaacagcagtaacactgccagcacaaacatcacgcccatcggtttgcagaatccccagaagttatttctgacttcatccaccttgcgcaccagatagctcgcgagataaacaaacagtgccagtttcgatacttccgcaggctgaatacgcatcggcccgatggctatccagcgtgatgccccgttaaccgagctgcccacgccgagtaccacaatcagtccgccgatcgtaccaatcagcagtaatgtgctgtagcgctgccacatttccagcgggaaacgcataatcacaacagcgataataaaagcaaaaattaagaagccgccgtcacgcttggcaaaatagaaaggatcatccgccagacgctgccccacgggcatagaggcggacgtcaccatcacaaagccaatcgcggccagtcccagtgcaaaccacagcagtgtccggtcatacatcacgaccgtactgaactcgccgttacgctcgccgatcatccagtttttaaaacgctgtgatccggggaatctcatgccgctaactcccgtgccagacgggcaaattcacgcccgcgctcttcaaaattacggaactgatccaggctcgcacaggccggtgataacagcaccatatccccggcagccagtgacggtgccagcgcccgcattgcctgctccatggtgtctgtcagcagagagacatccggacgcagctgcgccagttgtgcgccgtcacgcccgaagcagtaaagacggattttttcgccgctcaggtacggcagcagcggagagaaatccgctgatttaccgtcaccgccgagcagcagatgcagacagccgtccacctgcaggccgttcagcgccgcttcggtactgccgacgttggtggctttggaatcatcaatccagcggatcccggcagattcatgcaccagctgaaaacggtgcggcaggccgctgtaagtgcgcagtgctttcagtgcgccttcacgcgggatattgaccgcatctgccagtgccagcgctgccagggcattacagtagttatgctggccgtgcaggatcatctcactgcagttaataattttttcaccgcagaagcagagtgcctgctcatcggtatccagccagtaatcgccggtttcaacaccgaagctgacatattcagagcggtcacaatcacagccgggctgtgtcagtgcatcttccgcgttatacacgcagacggccgcatcgtgataaacacgcagttttgccgcacggtactgctccagcccctgcggatagcgatccatatgatcttccgtgacattcagaacagtggccgccgccggtttcaggctgaatgtggtttccagctgaaaactggataactcgagcacacagaggtcataatcgtctttcagcagttcaagcgccggcagaccgatattaccgccgacaccggtacgcagaccggcacagcgccccatttcccccaccagggaggtcacggtacttttgccgtttgagccggtgatcgccacaaccgggacagttacttcgcgggcaaataattcgatatcgccgataatttccgcaccggcctgcgccgctgcctgcagttgcggagtcctgcccgccactcccgggcttgcgataatcaggtcggcatccagcagccactgcgtctcaaatccgccgcagtgacactgaacgctgtccggcagcttatcgatgccgggcggggaggtgcgggtatccatcaccttcggcgtaacgccgcgtgacagaaaaaagtccacacaggaaagcccggttaaaccgagcccgacaatcacaatgtctttcccctgataattcgtcatgattaacgtaccttgagtgtcgccagaccgatcagcactaacatcagggagataatccagaagcggacaatcacccgcggctcaggccagccttttaattcataatggtgatgaataggtgccatccggaaaatacgctgaccgcgtaatttgaaggatccgacctgtaaaatcaccgacagagtttccaccacgaacacaccgcccataatcagcagcaggaattcctggcgcagcagaacagcaatggtacccagcgcgccgccgagtgccagtgaaccgacatcgcccataaagacctgagccggataggtgttaaaccacaggaaacccagccctgccccgacaatcgcggtgcagacaatcaccagctccccggcatgcggcagatacgggatatgcagataatgcgcgaaattcacgttaccggtcgcccacgccaccagagcaaacccggcagccacaaagacggtcggcataatcgcgaggccatcgaggccgtcagtcaggttcaccgcgttgctggtaccgacaatcacgaaatacgccagcaggatatacagcacacccagctgcggcatcacatctttaaagaacggtaccaccagctgagtcgccggggtgtctttgccgatggcatacatactgaacgccacagtcagcgccagcacggactgccagaaatatttccagcgggcaatcagccctttggtatctttgcgcaccactttgcggtagtcatcgataaagccgacaataccgtagccgatcagcaccagcagcacacaccagacatacgggttgtccagacgcgcccacagcagaacagaaatggcgatggagaacaggatcatcatgccgcccatggtcggggtaccgcgcttgctgaagtgcgattccggcccttcgctgcggacaacctggccaatctgcattttctggagatacgcaatcacatgcggccccatccataatgcgataatcagcgaagtcagcaggccgacgatggcgcggaacgtcaggtaagagaagacgttaaacgcggtatgaaactgcaccagatactcagccagccaaatcagcatgggacattctcctgcaaggcgtgcacaacttcttccattgcggagctgcgtgaacctttaactaaaattgaaattgatgaatgctgtgccaccagaggtgccagcgcagcaatgagggttgttttgtcagcgaaatggcgtccctgacactcatcactgataaaatgactgaactgacctgcggtgaacaccgcatccagcccggcatcgcgggcagcctgcccgactctgcggtgactctcttcggcgtaaccgccctgctcgccgatatccccggcaaccagcacgcggtaacccggcagttgtgccagcacacggattgccgcaatcatcgagccgtcattggcgttgtaagtgtcgtcaatcaccagcttgcccggtgccagctcaaccgggtataaacgccccggtacagcgctggtttgtgccagaccactgcggatatccgccagtgtcgccccggcagagagtgccagtgccgccgccgcgagagcattggcaatattgtgacggcccggcagcggcagtgtgacagcagtgctgcctgccggtgtgtgcagggtaaagtcagtggtcagcgggttcatcaccacatcagccgcgtaaaaatcggcctgcgggtgcggatcaacggagaaactccagcgggtctgacgcggggtcagatgtgcctgccagtgagtgaaatcattgctttccagattgatgatggcggtgccttcgtcagtcaggccggtgaaaatctcaccttttgcctgcgcgatggcttctgcggaaccgaactcgccgatatgggcggcaaacaggttattcaccagtgcggtctgcgggtgtgtcatggcagcggtatacgcgatttcgccggtgtggttggcacccagctcaatcaccgcaaactgatgtttttctgtcaggcgcagcaatgtcagcggtacgccgatatcattattaaagttaccggcggtaaacagggtttcgcctgcctgctgtaaaatcgccgccgtcatctctttgacagacgttttgccggacgaaccggtcagcgccaccactttcgcctgactgcggtcacggtttcctttcgccaccgcacccagcgcaaggcgggtatctttaacaataatctgcggacagttcacgtccatccggcggtttaccaggacggcagcgacacctttcgctgccacatccgcaataaaatcatgagcatcaaaacgttcaccggccagggcgataaacagcgcacgttcaccgatagtgcggctgtccgtggtgacactctcaatccgttctgatgccgcgtgaccgctgaggataagctccccggcggtcagttgtgcgatatcagcgagggagaacgggatcatgccattactcccagcaggcgggcgacggtcaggcggtcggagtagtccagacggcggttgccgaccagctgataatcctcatgcccttttccggccaccagcaccacgtcatccggttttgcctgcatcaccgcaaaggtgacagcttccgcacggcccgggatcggcagtgcacgggaggtatcaaccagcccggccataatgtcattgataatcgcctgcggctcttcgctgcgcgggttgtcgtcagtgatcaccaccacatcggattcctgctcggcaattgcgcccatcagcggacgcttacctttgtcgcgatcaccgccgcagccgaagacacaccacagcttgcctttggtatgcagacgcgccgcactcagtgctttttccagcgcatccggggtgtgagcgtaatcgacaacaactgtcgggcggttatccgccgtgaagacttccatccggccgcagaccggtgttaacgcggttgctgcgcgcagcagtgtattcaggtcataatccagtgccagcagggttgccgcagccaccagcaggttactgacgttaaaggcgcccatcagcgggctgtccagttcaccgtcaccccagcttgaggtaaaggtgatgtgcgcaccgctgtcgtggtaatccacagaaaccgctttcagaaaacgcccctgccagccggccggcagattatcatccatcgtgaccgcgaccgcttccgggagttttgccagccatttcagccctgtctcatcatccgcattaataattttttgttcgctgtgatgggttgagaacagcagccatttggcagcttcgtagttggccatatcaccgtggtaatcgaggtgatcacggcttaagttagtaaagaccgcagcccggaacggcagtgccgccacacggctctgtaccagaccgtgagaggagacttccatcgccgccaccgtggcacctttcttcgccagtttgtccagttcgagctggatatcaacggctgagccggtggtgttttcagtcgggatcacatgcccgagcagcccgtttccgaccgtccccatcacagcgctggtttcgcccatcgcctgcgtccactgcgccagcagctgggtggtggtggtcttaccgttagtgccggtcacgccgatcagtttcaggcgttccgccgggtggtgataaaactcaccggccagacgggataatttttcattcaggtggctgagatacaccaccggtacaccatgcagaacctgcacactgccgtcttcggccgcaccatccgcttccgcgaccacagcagccacaccctgggcaatggcctgaggaatgtagtgacgtccgtcggactggtggcctttacccgccaggaacagatcaccggcagccgctttgcggctgtccagggtcatatcacgtaacgccttagccggtgcatcaacaccgagcggcgcgagtaaatcgcgcaaattacgatctgccacttgtaccctcttttggtttattaataaccacttcattagtttgttcttccggtgtcagcgcatcgggttccacgttcattgtccgcagaacaccgcccatgatggcaccgaataccggtgcggagatcgcacccccgtaatacttgccgccctgcgggtcgttgataatcacaaccagtgcaaaacgcggacggcttgccggtgcaaccccggcggtgtaagcgatataacggttcacgtatttcccgtcgtcgcccacttttttcgcggtcccggttttaatggccacgcggtaccctttaatcgcagcgcgcgttccgccgccgcccggtaacgcaacactttccatcatctgaaccacggttttcatcaccggctcagggaagacacgggtgcccggcaccggcggatccacttttgtgatggacagcgggcggtaaatcccgaaactgccgattgttgcataggcccgcgctaactgtaacggtgttaccatcagcccgtagccgaaagaaaaggtggccctttcaagctcagaccaccgtgtttttttacttggatatatgccactgctttctccgaccagccccagattggtcggttttcccagcccgaaacgcgaatagacgtccacgagttcctgagcgggcatcgctaacgcaagtcttgaaacacctacgttactcgacttctgtaaaataccggtgatggtcagttcggcataacgcgccacgtctttgatttcatgaccactgatccggtacggataagtattcaccacgctgttcggtttgatgatgttgttgtgcagtgctgtcatcaccaccaacggttttaccgtcgagcccggttcaaaaatatcggtgatcgcgcggttacgcatggcatctttcggcgtaccctggaggttgttcgggttataggacgggctgttcgccatcgccagaatttccccggtgttcacatccaccagaatcgccgtgccggattccgctttgttcagtgccaccgcactgctgatttcgcggtataccagcgcctgtaaacgctcatcaatactgagtgtcaggttgtgcccggcctgactttcgcgggcgatagtatcttcaataacacggccgccgcgatctttacggactgtccgctgccccggaaccccggtcagccagcggtcaaagcttttctcgaccccttcaatcccttcatcatcaatattggtgacaccaataatatgagcagtcacagagccggacgggtaataccgttttgattccgcctgtaaataaatccccggcagattcagttttttcacataatcgccgatggtcgggttcacctgacgcgccagatagacaaagcggcctttcgggttcgccgtaactttgcttttcacctgttcgagcggaatattcagcgcttcggacagtgcacgccagcgggtgtcatcccctaccccgcctttgtcggctaactctttcggatcagcccagacggcgttaaccggcacactgaccgccagcgggcgccccatgcggtcgctgatcataccgcgtgcggtcgggatctcctggacgcgcagcgagcgcatatcgccctctttgaccagcatgtccgggttgataatctgtaaatacgcgacccggatcagcagggcggccagggcaagcccgataccgccgcataacaacgcaaaacgccagctgataaaactggctttttcttccggacgtttgatacgggcaccgccctgcgttttggctgctgcttttctgcttttcatgccttcgtcattttgttacgacaattttttcgtttgccggatccacatgctgcatactgagacgctcaacggacaggcgctcaacacggctgtgatcccccagggcgttctcttccagaatcaggttacgccattcgatatccagcgagttacgctccagcacaagatgttcccgctctgcggtcagcagacgtgttttatgtgccgtgatgaccacaaaaatcgcgctgacgatcactgcgataaataaaatcgcagggataaatccgtggcgcagcaggtcacgacaaataacgcgggctaaattgtgccgttctgtggtcatgctttctccgcaaagcgcagtactgaactgcgggcacgcgggttaacactgatttcctgctctgacggtttcatttttccggccagtttcagtgccggtgtgccgtgcgctttcagttgttcttccgtcagcggtaatccgtgcggtacctgtggtccgcggctttcgtcgcgcataaactgcttcacaatccggtcttccagcgagtggaagctgataaccgataaacggccgccctgagccagaatgcccagtgcgccggtcagcgcctggcggatctcatccagctcgctgttgacatagatgcggatggcctggaagctgcgggtcgccggatgcttgtgtttttctttcaccggagacacagcggcaattaaatccgccagctgttttgtccgcgtcagcggctcttcggtcttattgcgttcaacaatcgcgcgggcaatccgtttcgaaaaacgctcttcgccgaaatttttcagcacccatgcaatatcttcttctttggcttcagtcagccactgtgcggcggagatcccgcgtgtcggatccatccgcatatccagcggcccgtcacgcataaaggagaatccgcgctctgcgtcgtccaactgcggggaggacacacccagatccagcagaacgccgttaatctgtccgcccagctccagatcattcacataaccggcgataccggaaaacgggccgtgaataatggaaaaacgcgggtcgtcaatctgtgccgcagcggcaatcgcctgcggatcccggtcaatggcaatcagacgcccctgcggaccgagttttgataaaatcaggcgggagtgcccgccgcggccgaatgtgccgtcgatataaatgccgtcttcgcggatctgtaatccgttaacggcttcatccagtaaaacactggtatgctgaaactgactctctgccatttaaagtgataaatcctgtaaccgggcggataaaggtccggatgccgtctgcccggcagcaatatcatcctgtacctgctgataccacgtctgctcatcccacagctcaaacttgttgaactgcccgaccagcatgacttctttggttaaccgcgcatgtgtgcgcagtgtaccggctaacaaaagacgtcccgcactgtccatctgacattccgtggcatggcccagtaacaggcgctgaacacggcgctctgtgggatccatggtggacaattgtgccagtttcagttcgatcagttcccactccggtaaggtgtaaagcagcaggcacggctggtggagatcgatagtgcagaccatctgaccttccgacttttcagcaagcagcgaccggtaccgtgccggtacggttatgcgccctttgctgtcaagattaaccagtgttgccccgcgaaacattcgtttctccgctcagttttgccctgaattaccactttcacccacaattccccaccaacagagtttacgaatggtaggaaaagcttgtcaagccagagctgacaaggtttcgtttccgctgtcggggaataaaggggtgagaaaatatgggattttttgcttcagggaacagaagtgaggtaacacactgattcaaatcagaaaaaaattcacataatacgcactcggctaaccgaggcaaattataccgaatctggcgaaagaaagatgcatttttgcgaggtgtccctcactttcaggataaaaattcaccatcaccgcaaagaccccgggatttttgttccggtcatctgtgctgttactttctgttacacagcgtgattatttgatatttgaaaatttaatattcagtttatcaatagcataactgtcacaaaaccagactaatgatattctgcggcacatacccttaattggagtaagtgaatttccggggagtgaaaggtgtggtgtgaaaattgtcaatttctgtcaatcagcagaattgaaaaaaattcttaggattcctctcaaaaagggtttttcatctgtttccggacaaactaaacaaaaatacctatacgtttccgtacaggtatcaggaaaaataattattttactgcctgaatattaccggcggctcagacttccgcgacggcacagatcacgacggatccgggtgatgcccgcagccggtttctgtttttcatccagactggccagtaccagctccagcacacgctccgcaatatcgcggtgacgctgcgccacggacagtaccggacactcaaggaaatcaagcagttcatgatcaccgaaggtcgcgatcaccagttgccccggcagacggccgctgcgggccagcgtggcatccatcacaccctgtaacagggcaaatgaggtggtaaacagcgcatccggcatcggattgctttccagccaggtatcaaacgcttttgcggcggcatcacgctcatagctgtcggcatagaggaaattcacgttacgtgcatccccttcccaggcttcacggaatccctgttcacgcaggaaactgacggaaagttccggtaacgcgccgagatacaccaccgattctgccgggaactgacgcaattcggatgccagcattttggcgtcctcaaagtcatccccgaccacactgataaagtgctcattttccagtgcgcggtcgagcgcgacaatcggcagggagcggtttgcccagcgctgatagaacggatgctccggcggcagtgcggtggaaacgataatcgcatccacctgacgctgtaacaggtgttccacacaacggatttcgttgtcaggctggtcttcggagcaggcaatcagcagctgataaccacggctgcgcgcctggcgctccagataatttgcgatgcgggtgtagctggtgttctccaaatctgggatcaccagtccgattgagcgggtacggcctgcacgcagaccggcagccaccgcattcggatggtaattatgttcacgaaccaccgccatcactttttcgacagttttgtcactcacacgatattgttttgcttttccgttgatgacataactggccgtcgtgcgcgacacaccggcaaggcgggcgatttcatccagtttcacgttaaccccttacaaatcaggaaacggcccgaacaacgggccaaataagaagagtgatcagtttaccctttcaccgcgaatatttcaccgcattattttatcaccgcgcgacatcccgacgatgccggagcgggcaatttccacaatttccgcgaagccgcgcaccgcatccaggaaggcatccagcttttcactggtgccggtcagctgcacggtataaagcgtcgcggtcacatccacaatctgtccgcggaagatatccgtactgcgtttgacctcatcccgcccgtaaccgctggcctgtaatttcaccagcatcacctcgcgctcaatgtgtgtggcagaggtcagttctgtgacacggaacacatccaccagcttgttgagctgcttttcaatctgctccagcacccgcgcatcgcctttggtctggatggtcaggcggaacagtgacgggtcatcggtcggggcggcggtgatactttcgatattatacccgcgctgggaaaaaagccctgccacacgggacagcgcccctgtttcgttttctaataaaattgacagaatccggcgcatgatcaggtcctctccgttttgcttaaccacatttcatccattccgccattgcggatctgcatcggataaacatgctctttctcatccaccatcacatcggcgaacaccagtcgtttctcttcgcggacaatgcgcagtgcctccgcaagctgttcacgcagcgtggctttatcactgatactgatgccgacatgcccgtaagcctctgccaggcggacaaaatcaggcagcgattccatataggagtgtgagtgacggccgtgataaaccatatcctgccactgcttcaccataccaaggaaccggttgttcagattaagcaccagcaccggcagcccgaactgtaatgccgtggaaagttcctgaatattcatctggatactgccgtctccggtgacacacaccaccatatcatccggtttcgccagccggacacccagtgccgccggtaacccgaagcccatcgtgcccagcccgccggaattgatccaacggcgcggttcatcaaacgggtaatagagtgcggcaaacatctggtgctgaccgacatcggaggtgacatacgccttcccttccgtcagttcccacagggtgcggatcacggtctgcggcttgattttctccccgctctcatcaatggccagacactgtttcgctttccactgatcaatgcgccgccaccagtcgcacagtgcatccggatcctgttcatcggtcagagattcaagctgtaacagcatctgcgcgagacacagtttcgcatcaccgacgatagggatatccgccgccacggttttggagatagacgccggatcgacatcgatatgaatgacagttgcctgcgggcagtatttcgccaggttattggtggtccggtcatcgaaacggacaccgacggcaaaaatcacatcactgtgatgcatggtattgtttgcttcatatgtcccgtgcatacccagcatgccgacacactgcggatgagtgcccggaaacgcgcccagccccatcagggagagcgccaccggcagacgcagtttatccgcaagggtgaaaatctccggactgcatccggcactgacagcaccgccgccgatatacattaccgggcgtttcgcctgcatcagtgtgataagcgcgcgtttgatctgccctttatgaccggctccggtcgggttataggagcgcaggctgacccgtgacgggtagctgtactcatgctgctgctggacaatatctttcggaaaatcgatgaccacaggtcccggacggccgctctgtgccagatagaatgcttttttgatggtggccggaatatccgcgacatcatgcaccaggtaactgtgtttcacgaccgggcgggaaatgcccaccatatccacttcctggaaggcatcgttgccgatcagcgcactcgccacctggcctgacagcaccaccagcggcaccgaatccatatatgcggtggcgataccggtaatagcgttagtcgcccccggtccggaagtgaccagcaccacgccggttttaccggtcgcgcgggcatagccgtccgccatatgcacggcagcctgctcgtgacgcaccagaatgtgcccgacgccgcccacggtatgcagtgcatcataaatatccagaacagcgccgcccggatagccgaatacgtgtgacacgccctcatcaattaaggagcgcacgatcatttctgcccctgtcaacctctccataaatgctctcctgcccgtgattgcgggttgtaactgcaagtgatgtgtttgtctgtttttagttatctgaggattaacataacgataaaatgacagtgctggcaaatgcgtttttcgggacgcaaaaagcggaaaaccacaggaataaaggaaatctcatgatccgcagacgatcatacctgcggcggcaaatcacaaagcagagttcactgagagcgggggaaaaaccggcgggatataaaaacggcactgcacaggaaacaggcagtgccgtcagggacatcaatcagtccgtatacatcgactcaatttcgcgctgatagcgctgggctatcactttacggcgcagtttcagggttggtgtcagttcaccgagttccatggagaaattctgcggcagcagtgtgaaacgcttaacctgatgaaaggcagcgatatttttctgcaactctttcagacggctttcaaacagtgccacaatctggctgtttttcagcagttccatccggtcatggtatttcagattcagtgcccgcgcgtgctcttccagagtgtcaaaacacggcacaatcagtgcggaaacaaacttacgtgcatccgccaccacggcgatatgttcgataaagcgatcctgacccagcgtaccttccagcatctgcggcgcaatgtacttaccgttcgaggttttcatcagatctttcaggcgttcggtgataaacagattgccctgctcatccagcgcaccggcgtcaccggtccgcagccagccatcagccgtaaaggcctgacgggtctcttccggcttattgtaatagccgcgcatcaccacaggaccgcgtacctgaatctcattttcctcaccgatacgcacttccacatccggcagcggcacaccgatagagccgagctgataaccgctgttttcccagcaggataccgtggcacaggtttctgtcatgccgtagccgtatttgatgttaatgccgatggcgaggaaaaagcggataatttcatcatccagccgcgcccccgccgccggtaagaaacggacattgccgccgagcacatcacgcagtttaccgagcacttttttctgtgcgaactgatcacaccgcgcggccagccacgattgtttttcaccacgctgctgtgcatcaagggtctttttaccggaccgtaccgcccagtggaataacgcacgtttataccacggcgcctgtgccactttttcgtaaataccgctgaatactttttcatagaaacgcggtaccgcacacatcacggtcggtttcaccgataccatcgctttgcgcaccagattggtatcactgagatagacattcagtgcgcctgtgtgcatcacatagaagctccaggcgcgctcaaaaacgtgcgtcagcggcaggaagcagagtgagacatcatcttcggtcagtgtcagccgctcatcatgcagataaagctgggcggccatgttgcggtaatccagcatcacgcctttcggctcaccggtggtcccggaggtgtaaatcagggtgaaaagatcgtcaagggaacaatccgcaatgcgctgacgcagctctgcggcgtaactgccgtcgtggccgttcataaactgacgcagtgtgcagaccgccggatgcgacgggattgccgtgttttccgggttcattatgatgattttctgcagcgacgggcagagagaaagcagtgacagagcaatttccgcctgcttctgaccgtccacaaacaggatgcgcacctgcgcatcattaagaatataggccgcctggtcatcactgctggtggcatagagcggcaccacgatggcacggcactgaagaatcgccaggtcggttaatgtccacagggcgctgttgtgcgagaaaatggcgacattttcctgcacttcaaccccttctgccagcagggcttccgccagattttcactgaacgacccggcctgctgccaggtaaaatcgatatgctgaccttgttcacaccactgtcgcagtgcgattttgtcaccccggcgctgtttttgctgttgcagccgcgtcactaaatgatagtgatgcaaatttgttgttgtcacacgcgtttcctttactgagccgtcagactgtacggtttcacgttatgtaataatttttcagcttacagttgtacgcttaaatttttccgcaagtgtagcctgttgtctccgggaacaaaagcaaatttagttatctttgcaatgacgggatcacaaaaaagccccggcaggtacatttgcctgacggggcgggaaataaattaaatgatcgattacatatgatgtgtgaactgcgtcagcagtgccttcatccactgatgccctttatcgcgggtacacgcctcgtgccagatcagaaacgccggacggctgactttatcccacggcagttgcacttcctgaatcggcagcacatgagaatagagctgaatcagccatttcggtgcaatcgccaccagctctgttttagagacaatattcagtacactgactaaattggttccctgataaacaatagcccggagtaattcattattttcataatacggcgaactgaatgaatcaattaaatccagcgacactacggcatgctgctcagtaaatatttgtttctccgttaccgtatattgtatacgcgggtgattacgggcggcgaccagtgacaactggtcattaaataataagtgatgactgtaatccggtttatcgaaacgattataactgacagcaaaatcagtttcctgatatttcaggttattctcgatatgtgaattcatataagactgaatattgacatcgatattttcactgtgaagtttaacctgttcgattattttgtctgtcaggcggatatccagcggactggagatagccagattaaatgtccgctcgctgctgcccggttcaaaaccggcacccggcaactcattatgcaccagctgcaatgcctgtctgaccggcccgaacagctgtttggcgcgcgctgtcggctgaatcccccgtccaaaacggacaaataattcatcattaaacataactttaagtcttgacaccgcattgctgacagccggttgcgacatacctaaaagttcagcagcgcgggtcacattctgcatctgcataaccgcatcaaaaacggtcagcagattaagatccacattgcgcagctgtgtttcaccggattctttttttacatctgccactgaggtgtattcagtcatcttaaactccaataaatgattataatgacttcaataagccacctgccgccatgatgaaacggcagatcaatacaaaattgaaatctattatctcaattgattatccaattaataattgagtctcttccttgtatggttctgaatacgcgggtgcgcatcatcatcacaatgcatactatttaaatatttaaagccagtaaattattcatgcgagtaataaatcaataccgctttattcatttagtttccatgcagtgagataataaaacaaaaattgtgtttattcataataaaattgtcttctgtcagcataaaaaatccgattttttttactgacataacggaaagaataaactgttcaatgaatatctcaccggttaccggtggctgcctgaccgccggaccccctgttacccgcctactcagctgattctgattctccgtaaaaaaatctgcaaaaatattagcccaattatttagctggcttatagatgaaaacgctgattaatttttataaattagtcagtttatctgctttttgtgctttttttatcctttgaccggaatctccggcgaaccgcgtgagttgacagggcattttatattcagtatcaataatacatcgccacggataagccctgtgcttcgtgccactaaatttactgagaaggttattactatgtctttcactttccgcctaaacagcctgctaattatcgccttaactgcgcgtggcgggttcgtggccggaagttcctcataactttctccctgagacctgaaaaacccgcgcaatgtcgcgggtttttttatacctgcaaaccggaaaacagaacaagaaataaccgagaggatcacaacatgagcgataacgtcatcatttttgataccacactgcgtgacggggagcaggcattacaggccagtctcagtgtcaaagagaagttacagattgctttccagctcgaacgcatgggggttgatattattgaggccggtttccctgtctcctctcccggtgattttcagtcggtgcagactatcgcccgcgaaatcaaaaacagccgtatcgcggcattatcacgctgtgtgatcggcgatattgatgccgcagcggaatccctgaaagtcgcggaagccttccggttacatatggtgctcgccacctccggtattcacgtcaaaaccaaactgcgcaagacctttgctgacatcatcgatatggcggtcggctcgattaaacatgcccgccgctttaccgatgacgttgagttttcctgcgaagatgccgggcgcactgatattgatgatttatgccgcattgtggaagccgcgattaacgccggagccaccacggtcaatattccggacaccgtcggttacaccacgccgtaccagttcggcggcattatcagtgaattattcaaccgtgtgccgaatatcgacaaaaccatcatttctgtccactgccatgatgatctgggcatgtccgttgccaactccatcaccgccgtgcaggccggtgcccgccagattgaaggtacgatcaacgggttaggcgaacgcgccgggaactgtgcactggaagaagtgattatggcgattaaagtgcgggaaaaaatgctgggcgtgcgcaccgggatcaatcacaaagagatttaccgcaccagccagctggtcagccagttatgcaacaccccggtaccgccgaacaaagccgtggtcggcagcaatgccttctcccactcctccggtattcaccaggacggcgtgattaaaaaccgcgaaacctacgagatcatgacgccggacagcatcggcctgaaagataacttaatcaacctgacctcccgctccggccgcgcggcggtgaaacaccggatggcggaaatgggttatcaggaaggtgactataacctggatgaattatacgccgacttcctgcaactggcggacaagaaaggtcaggtcttcgattacgacctggaagcgctggtgtttatgaagcagcagcaccaggagccggaacatttctcgctggcgttcctcaacacccagtccggtaccggcgtcaaagcctccgcgatggtcagaatgcaggccggggatgacattatctcggaatccgcccaggggaacggcccggttgatgcggcttatgaagctatccgccgtatcgcgggttacccgctgaccctcgccgcctatcagctgaccgccaaaggtcagggaacggatgcactgggtcaggtaaatatcgtggtggagtatgaaggccgtaaattccacggcatggggctggcgaccgatattgttgaatcctccgcccaggccatgatccacgctgtcaacagcatctggcgcgccggacaggtaaaagaagaaaaacggcgtatgcagtcagataacaacatgcacaacgatactcataacaacaatacagagacaaaggaagcggtgtaattatgtcggaacaatttcatattgcagttttaccgggcgacggaatcggccctgaaattatggcgcaggcgattaaagtactggatgcggtgcgcacccgctttaacctgaccatcaccaccagtgaatatgatgtcggcggcattgccatcgacaaccacggccacccgctgccgccggccacgctgaaaggctgcgaacaggccgatgcggtgctgttcggctctgtcggcggcccgaaatgggaaaaactgccgccggactcccagccggagcgcggcgccctgctcccgctgcgggcacatttcaaattattcagtaacctgcgcccggcacggctctatccggcactggaagcgttctgcccgctgcgcagtgatatcgccgcacgcggattcgacattctgtgtgtccgcgaactgaccggcgggatctatttcgggcagccgaaaggccgtgaaggggaaggtaaatatgagcgtgcttatgataccgaggtgtatcaccgctttgaaatcgagcgtattgcccgtattgcctttgcctccgcccaaaaacgccgtggtcaggtaacatcgattgataaggccaacgtactgcaaagttccgtattatggcgcgaagtggtaacagaaatcgccaaagagtatccggatgtcgcgctgtcgcatatgtatatcgataacgccgccatgcagatggtgaaagatccgtcgcagtttgatgtgatcctctgctccaacctgttcggcgacattatttctgacgagtgcgccatgatcaccggctccatgggcatgctgccgtccgccagcctgaatgagaaaaaatttggtctgtatgaaccggcaggcggttctgcgccggacatcgccggacaaaatattgccaacccggtggctcagattttatccgctgccatgatgctgcgcttcagctgcgggcaggatgcagcggcagacagtatcgaaaacgccgtcaatcaggcactgaatgccggataccgtacccgggatgtggccggaaacggcaagagtgtgaccacagatgagatgggcgacattatcgcgcgtttgattacagaaggggcttaagatgagcacaggaaaaactttatatcagaaattatatgatgcccatgtggttcgtgaagaagcaaacgaaacaccgatcctgtatatcgaccgccacctggtgcatgaagtgacttcaccgcaggcgtttgacggattacgggccaaaaaccgcccggtgcgccgcccggagaaaaccttcgccaccatggatcacaacgtctccacgcagaccaaggatatcaatgcctgtggtgaaatggcccgtaaccagatgcaggagctgatcaaaaactgtgaggcctttggtgtccgcctctatgatctgaaccatccgtatcagggcattgtgcatgtgatggggccggaacagggcatcaccctgccgggcatgaccattgtctgcggtgactcccacaccgccactcacggtgcattcggctcgctggcttttggtatcggcacctccgaggtggaacatgtgttagccacccagacactgaaacaggcgcgggccaaaaccctgaaaattgaagtgcgcggcaaagtggctcccggtatcaccgccaaggatattgtactggcgattatcggtcacaccggcagcgcgggcggcaccggttacatcgcggaattctgcggggatgccattgaggcactctccatggaaggccggatgaccgtctgtaatatggccatcgaaatgggcgccaaaggcggaatgattgcgccggatcagaccacctttgattacctgaaaggccgccagttctccccgcagggcgcggactgggatgcagctgtggcttactggcagaccctgaaaagtgatccggatgcgaaatatgacgcggaaattattatcaatgccgccgatatcgccccgcaggtcacctggggcaccaatcccggtcaggtgattgatatcagccgcgccattcccgcaccggaaagctttaccgacccggtggaaagagcctcggcagaaaaagcactggcgtatatggatttaacgccgggcaaaaaattaaccgatgtgaaaatcgacaaggtgtttatcggctcctgcaccaactcgcggattgaggatttacgcgcggcagcggcggtcgccaaagggcgcaaagtcgcaccaggtgtgcaggcgattgtggttccgggctccgggccggtgaaatcccaggcggaagcggaaggtctggataagattttcactgatgccgggtttgaatggcgtttaccggggtgctcgatgtgtctggcgatgaacaatgaccgtctggcaccgggggagcgcagtgcctccaccagcaaccgcaactttgaaggacgccaggggcgcggcggacgcacgcatctggtcagcccggccatggccgctgcggccgctgtcaccggcagtttcgccgatatccgtaccattgagatgcgctgaggagaaaatcatggaaaaatttattgtacatcagggcattgccgcaccattagacgccgccaatgtggacaccgatgccattatcccgaaacaatttttgcagaaagtgacccgtaccggcttcggacagcatttattcaatgactggcgttttctcgatgatgacggccaggtgccgaacccggattttgtcctcaacgcaccgcgttatcagggcgcatccattctgctggcacgggaaaacttcggctgcggctcctcccgtgagcacgcgccgtgggccttaacggattacggcttcagagtggtgatcgcgcccagctttgcggatatcttttacggcaattcattcaacaaccaattattaccggtgaaattacccgaagacgcgattgatgcgctctttgactgggtacaaaaaacagaaggtgctcagattattgttgatctggaaaaccagaaagtgatcgccggtgagctggaatatccgttcagtgttgatactttccgtcgtcactgcatgatgaacggcctcgacagtatcggcctcaccttacagcatgacgacatgatttcccgttttgaagaaaaactgcctgcatttatgaactgataaccggatccatttccaccattgaacccctgccatcaccccttttgtgatggcagcttttttccccgtttttccccgcctctttttccggatcaccggacagaaaaaaaccagcctttcggctggcggtaaaagtcaccattactcaagaatcgggagtgagtcaggtatcacactgacgtcatgagctgctttaatgacattgagtatggacgtaatatacggaaataaaaatggacagaaaaccgaccggagttcctcttttatgagcacaccacgcctccagcaccagtttatccgcctgtggcagcatcatcagggacaggagaccgataccacgcttcaggagatcgccgatatcctgcattgttcccgccgtcacgtccgctctctgctcagcagtatgcagacagcgggctggctcagctggcaggcggaaaccggacggggtaagcgctcacgtctctgtttcctgcagagcggacgggacctgcagcacgcccgtgccgaacagttgatcgagcaggacaatatcgaaaaactggtggcgatggtcaatgataaggacgcgatgcgccagatggtgttatcccagctggagcgcagcttccggcagggaaaaagtctgctgcgtattgtctattaccgccctttttataatttactgcccggctcgccgctgcgccgctcggaagttcatctgctgagccagatttttaacggactgacggcaataaatgaggaaaacggggaagctgtcccggcgctggcgcatcactggcagcaaaccggcgacaaacagtggcgtttctggctgcgtccggcaatatttttccatcatggccgcgagttgcagatggtggatatcatttcctcttttgaacgcctgcgtgacacacacccgctgttcagccatatccgcactgtccgttccgatatgccttacattatcgatatcacactgaatgaggccgacagctggttcccggtgctgaccggcagcccgcacgccgccattctgccccatgagtggcaggaactgccggatttcgcccgccgccctgtcggtaccggcccctatcaggtgatctgtaataatgaccgtaaactgacaatccgtgcctttgaccactattacggcttccgtgccctgctcgacgaagtttctgtgctggtggtgccggagctggaagaaaaaatggtctgcaccaccctgcatatcggcgcggacgggccggagcgggattctctcgacagccggatggaggaaggctgctatttcctgctgcatgacacgcgttcggcaaaaggagagcgggaagatatccgccgctggctcaacagcctgatgacccccgtcaatctgctgtatcactgcgaacccctgtatcagcgccactggtggccggcttacgggctgctgctgcgctggcatcacagcaaacttatcccgccctgtgaaaaaccggctgacctgacagagctgacactgacctattatcaggatcatcacgaataccatgctatcggcaaattattgcagcagttactggcagaacagggtgtaaaactgacgattaatatcactgattacgacacctggtttaacggcggttgtgacagtgatttctggctggcgaccgccaacttttataagccgctggatttttcggttttcgccaccctgtacgagctgccgctgctgcgccgctgtctgggcgatgatctgcgtgcgccgctgaagcaatggcggcagcgttctctgtctctggcggcatggtgtgagcagatcattgacaggcagatgctgttcccgctgttccatcactggcttgaattacaggggcagcgcagtatgcggggcgtcaaaatgaataccttcggctggtttgattttaaatctgcctggtttatccccccggaaagttaattcacagaaaaaggcaaagttataaacaccctctgataaaaaaccggcttttattcacgttttctgtggatatagttgtgaaaaacgcaagggtaatgggggtatagtttttcactgccccctgttgataaaatcacaaccgttaaataaatgctgttaaatcatatcagtacagaaataaaaaaagagaatcgtctgaaaaaatcaccggcattttttttcacagacttacacagcacaaaaaataaccacacccggtgttatccacagattgtgacttatccgtgagcaaaacccctgctgaaacgcgaaaacaggcggaagtcaagcctgtaaatcaaaccagtagtgaggcagttttccacttatcccataaagctgtggataactcagtgtaagatcctgtttattgtctgaggatgctggtgcacaaccttctgtacttgttgcggcggcgaaaattaatagctatatatcaataaattagataatatttatttttcattcatgcctatgtattattttaccggataacactgttcaacttttaagcatataacatgactcaactttttcagccgccgttacccccggccagtgaatcagagctgctcagccgcgcccaatcccttgccggtgccactttcggtgagctggcgggctgtgccggtataccggtgccgccggatctgcgccgcgataaaggctgggtcggcatgctgctggaatactggctgggcgcggatgcgggcagcaaggctgaacaggattttgctcacctcggggtggagctgaaaaccattcctgtggatgaatccggcgtaccgctggaaaccacctttgtctgtgtcgccccgctgaccggcaacagcggcgtcacctgggcggattgtcatgtgcgtcataagctctcccgcgtgctgtgggtgccggtggaaggtgcacgtcatatcccgctggcagagcgccgtgtcggttcaccactgctgtggtcaccgtcggaggaggaggaacgcctgctgcgtgcggactgggaagagctgatggatatgattgtgctggggaaagtggagcagatcaccgcccgtcatggtcaggtgatgcagatccgcccgaaagcggccaacagccgggcactcacagaagctatcggtccgcacggacaaccgatacaaacactgcccagaggcttttatctgaagaaaaatttcaccgcacctttacttaagcgctatttccggtgctgatcactgttttgggagtttgctcccggtaaatatgaatcgcttcagtcattaatatcggttcgaaaataatgacaacaggagtgttccggatgaaaaaaaccttactgacgctttcacttgcagccgcattactgactcccgccctgcccgcttttgctgatacatcctccgctgatatgacactggaacaggttctggtaatgagccgccacaacctgcgcacgccgattgtgaataccggtattctgaccgaaatcaccgataaaacctggcctgcgtgggatgcacagagcggttatctgaccaccaaaggcggcgcactggaagtttatatggggcactatttccgcgagtggctggatgagaacaaactgctgccggacaccctgtgcccgaccggtgaaaaagagctgaatgtctacgccaacagccttcagcgcacgattgccaccgcgcagttctttaccgccggtgctttcccgggctgtaccgttacagtgaaccaccagccggaaatcggcactatggatccggtgtttaacccgatcatcaccaatgacagcgcagagtttaaacagactgccctcgcggcaatggagaaccattacaaagggctggatctggccccgggttatcaggcactcaataaagtgctgaatatcaaagactcggaacagtgcaaaaccaataaactctgttcactggccgacggtaaaaacagctttattattgaagccggcaaagagccgggcgtgaaaggcccgctgaaaatggcaaactccgcagtggatgccatcgacctgcaatattatgaaggtttcccggcagaccaggtcgcctggggcgaagtcaccacgccggagcagtggactgcgctgaatactctgaaaaacggttatcaggaatctctgtttaccccgcgtattatcgcgaaaaacgtggcacatccgctgctgaactacattaatcagcactttgccgccgccgcaccgggcagtgaagcgaaatttaccttcctggccgggcatgattccaatatcgcctccctgctctcggctctggaatttaaaccgtatcagttgccggaacagtatgaacatacgccaatcggcggcaaattagtgttccagcgctggacaaataaagcggataataaatcctatgtgaagattgattatatttaccagtcatctgatcagctgcggaataacagttatctttctttaaaaactccgccgcaaaaagtcacactggaactgaaaaactgtccggttgataaaaacggctattgcggatgggaaactttccaaaaagtaatgaaagacagtttatccgaataaacattatatgttcatattcctgcccggcgcacctttgccgggctttttatttctatcccagtcacgcttcggataacactgatagattaaggcaccgtaagccgctactatttaacagtctgaaaatcatcacagtattttattgctcatttatcagtatcggcacccgtccgggaattaacggtcattataccgggctgaatacacggatatcattaatacgatgaaatatttaaaatcattaccggctcccttatttattattgcaactgtcttaataagttcaggttgcagtcagaaaaactatgatgtcgatgccggtgaaaaaataatttatccctccggtgacggtgtattactgggcgcctgtgataaatggacactgaaagatgaacaggtgcggcaattaattgccatgagcaaaccttatattgcgctgccgtacggtgaatacagccagacgccgtgtaatatgagcggcacggtgacaattgacggcaaaacctgggattatctgctcaacggcggcggtattatcaccctgagtattgacggtatggtgcgctaccgcggctgcaatgccgatgcctgtaagccgtacctgctgctcccttaccggggaaaatccttcgcgatcaaagacagtgataccctggtaacagaggaagacagcacggaaaaccggggccgcctgctgagccgcgaaagtgtcgcgcaacggcagccgcacagtgacccggggatggtttccggtgcaccgtctgacggcacaatggtgaataaagagaccggtgcggaacagttcaggccggataacggccagatgcgcagaccggatgcacaaccggtcgccgggggacagagcggacaaaccgccccgcagggacaacagagcacaccggtttcctctgaccgcaacggaaaagtacctccggcacggccgcaggcagaaaacagccggatgtcatccgtgaaaaaagaggtcgcatcagcggcagaatccgccatgccgtctgtggatgttgacgcaccgtcaatcacggccccggaagtgggcatctccgttccgggaacctccgcgccaacacttgatatcaaagccccggcagtcagtttaccgggagcagaagtctctgtccctgcactgaagaatccgttctgatgatctcagtcggacaaaaacccgcccccggcgggttttttaatgcctgaaccgcggcatattccgtgccctgcttcagactgcccatgtaacaatccatcccgtcggtaaacagatggaacaggcaaccaactgccaccgcccgcactttccatgacgggatcagcagcagaataagatacacaatcgccgcccatacggtatgcagcggatgaaaaccgacactgcatctgtccgggtcaaagacaggatctgccagcaggtgatcagcatccatcaccatagtggcaatcataatcatcgccgccgcttcccagtgctgccgccagaacagccgggcaaacagaaccggtaccagaaaatggcagccgtaatgcaggatattccggaaaatgtcaaatgccacagtaactccgctgacgggttgtccgttatgatgacggctatcatagcggaaataccggaggctatccggcagaaaatggatcagtccgtcacaataataaaatacaccccgttgcggataacaaagcgggaattaactggtctgctctgcgggtttatcgctgcattgtcttaagtaaactgagaagatcaggtatattaccccctgattgttggctaccaagaaaaaataactatgattatcaaacctaaaattcgtggttttatctgcactaccgctcacccggcgggctgtgaagcccatgttcgtgagcaaatcgcccgtgtgaaatcctgcggcgaactgaaaaacggccctaaaaaggttctggtgattggtgcatccaccggttacggtctggcttcccgtatcaatgccgcattcggcagcagcgcagcgactatcggtgtattttttgaaaagccgggcagtgaaaacaaaaccggttctgccggctggtacaacgcagccgcttttgataaagccgccaaagaagaaggcctgtatgcaaaaagcattaacggtgatgccttctctgatgaatgccgtcagaacgttattgatttaattaaacaggatctgggtcagatcgatctggttgtttattctctggcatcaccggtccgcaaaatgccggaaaccggtgaaattgtccgctctgccctgaaacctatcggcgaaccgtacaaatctgtcgcgctcgataccaacaaagacgtgctgatcgaagccgttgttgaaccggctaatgagcaggaaatcgcagacaccgttaaagtcatgggcggccaggactgggaactgtggatgaatgcattagaggaagccggtgttctggcggataatgcacagtctgttgcctactcctatatcggtaccgatttaacatggccgatttactggcacggtacgctgggcaaagcaaaagaagatctggatcgcgcagcagcagcgattaatcagaaactgcaggccaaaggcggcgcggcgtatgtcgctgtcctgaaatctgtcgttactcaggcatcttccgctattcctgttatgccgttatatatctctatcgtgtttaagatcatgaaagagaaaggcattcacgaaggttgtattgaacagactcagcgcttatttgctactaaactgtttaacggttctgcgccggaaactgatgaaaaacagcgtctgcgtctggatgactgggaattacgcgatgatgtgcagaacccctgccgtgaaatctggcagcagctgacagatgataacatcaacgatttaaccgactatcagggctataaagcggaattcctccgtttattcggctttggtctggacggcgttgattatgatgctgacttaagcggtgaagttaacttcgacgtgaaagaattagtgtaatcatctctgaaaagcccgccgcagctctgattattcagtggctgcggcgggtttcttatttttccggactgttcagcgggtttcgcagaccagccagtaataatggttattattgaatccgaactcatccagcaccgtcagcccgagcttacgggtgtgcgcggcataagagcgcgggttaaccttgttgataaaggtcaccaggatatcaaaccgctgcgacattttttccagcgcaaaagcaaacagcccttccagcacgccctgcccgcgcagtgatgcatcaatacagaccgggccgtactgatacgagttctctgtggtcagcgtctgaccggcaaactcataatcacccagtttatcaatcatatgggcaaacagcggccacggtgaccagtactgccaggatgccgccatcacaaacgccaccaccttaccatcctgtttagcgacaaatagtccctgctcgttttcaatcaaatcaaccatctgctcatcactcatctgtgtggtgacaaaaccgtccggcttgtcttcatcactgatggtggtcagatgataacgttttaataaggcttttacctgatccatatccgtcagttcagcaacacaatattccatcgttattctccgttatcattgttattctgcggcgggaggtaccgcaatatccgcaatgcgatcatgaccgatcacactgaaatagtcatccgctgccagagataccgatctcaccagttcaccggcgttaaaaaatacccgcccggcaccggtcaggcgcttatcaacatagagcgtcagttcgtcattaaagctgaacggcgggaccgcccccatcggacagccggtcagcgcctgtgctgtttccggcgcggcaaatgaggctttttttccgcccgccagtttcgcggcatttttaaaattgactttgcagtcacccggcacaatcgccagcacatagcggatgtccggtgcgctgccggtaacctgtaacaccatcgctttcgccgcctggctcagtttattcccccggattttacttatcgcatcagaacgaccttccgccggatgttcgatcacctcaaaggaaaccgcccgtgaatccagtaaacgggtgattttgtcaaatgttgtcatataaacctcacagtcagccggagaaacccttgcgtcataatttactctcaacgtactcttacagaaacacacagaacccgtaagaatgaggcagaacagatggtacagcttccgcgctaccggcagatggccgatcagataaaacaggctgtccgcgagggcgttttaccgccggacagccgcctgccgtccgtccgtgttctggccgcacaatacaatgtcagcctgaccaccgccctgaaagtgctgcgcacgctggaagatgagcatgttgcggtagcgcggccaaaatccggcttttttgtcgccccggttcagcctgccgctgcggaaagccgcagtacagagacacacaccgccgattttgccccgctggatgaacagacggaactgcatatgtcgatggtcggcgaagagtgccgtgtccggctcgatctggctaacggccgccgggagctttatccggtcagaaagctgagtcttatcatgcgccagctcagttacagcaagccgttcctgctgggggattcggtcaaaggcaccggctatgccccgctgaaagaggaaatcgcccgccgcgccgtcagttacggttgccatatcacaccggaaaccctgcttatcaccaacggctgtattgaagccttatcactggcactgcgcgccacactcagtcccggggatgcggtggcagtggaatccccctgttactttgtgctgttacaaatgctgcgtaatctcaatctgcggctgaccgaagtggatgcctgtgaagacggttatgtggattgcgataaactcaccgccctgttccgccgcaaagcagtgaaagcctttgtgacactcgccaacgtcaataatccgctgggcaaaacgattccggatgaagtcaaagcggagataacccgtcaggccgatgaaaacggtgtgatcattattgaggatgataccttcggtgatgcggcattcggcgggcagcgcccgttcccgatgcgggcattcagtcacaatgtcattctgtgcagcggattttccaaaaccatcgcgcccggcgtgcgtatcggctgggttcacagtcagcattacatgcgcaaaatcacttccctcaaatacacctcatcaatggggtcacaggtactgccgcaggcggccatcagcgaactgctgagcaacggcggctatgatgctcatctgcgccgcctgcgccgtgaactggcggcacaggtgcagaacattcgccgtgttgtgctgcgggaatttccgccgggtaccaccgtgaccgaaccggaaggcggctatgtcctgtgggtcaccatgccggaaggcagcctgaatgtgcgggaactgtttctcaatgcccgcgcggaggggatcggcattgcgccgggccatatctttgccaccgacaaccgctatgaccgctgtttccggctcaacgccgggttcggctgtgataaggacgtggaggatgcgctcgcccggctggcgcagtggtgcagggaatcattacacaccggataacccggggctgactgttctgtttctgcaacagtgaaacccgttttcatgactactccctgatagttcgcgcccttattatctgtttatacataattatcaggagagacatcatgagaaacattatcggcacctaccgcgcaccaaaaggccactgggtcggcgacggattcccggtcagccagatgttttcctacagcaatcacggtaaacatctgaacccgtttatcctgctcgaccgtgccggcccggcggatttcccgccatcagagggcgctaaccggggggttggtgagcacccgcaccgcggctttgaaaccgtgaccatcgtctatgacggcgaggtggctcaccatgactccaccggtcagggcggtgtgatcggtaaaggggatgtgcagtggatgaccgccgcatccggtattctgcatcaggaataccattctgaccgctttatgcgggaaggcggtacactggatatggtgcagctatgggtgaatctgcctgcttctgcaaaatccgccgcaccgggttatcagttactggaaaataacaccattccggcagcggtactgccgaatgacgccgggacattacgggtgatcgccggggaatatgccggggcacgcggtccggcccggaccttcacggaaatggatgtatgggatctgcgtctgaaagccggaaaagtcaccggactggcagcaaaagccagccgcaacgccggactgatcgttctgcacggcagcatttatgtcgacagccgcgcaccgctgcacaccggagagctgatgattctggacggcactgacagcactattctgctggaagccaccgaagatgcagttgtcctgttcctcagcggtgagccgattgatgagccggttgtcggttacggcccgtttgtgatgaacagcgagcaggaaatccgcgaagccattgaggatttcaacagcggccgcttcgggcatatccccgctgagtaagacagatgaggcaaatacgaccgttatttgcctcacaaaatgaggcgaatagcgtggttatttgcctcattgttttcgtttccgtgaattgtcttcaatatcactgtcgtttaaatattggctacccatgctgtgttaccatccaaatatcactgatattaaagggaaaccataccattgggcattgatatttcagcagataaaagggttagctttaatcctgatcatgaacacagagtcatcaccgccacaggaaaaaacccgaaaataacagctataggtaatgctgaaaggataaccgtttacagtatttaccggcgaactaaatttggtgacactgaccgtgacggaaacccgttaatatattcattaaaaggtatttataactacaggatcacaaacgaagaactctgtaagttcaaaccttcttttatcgctatcctgaataaaataaggcaaagaataccggaaaaaccgtgcgccttatttgcaatgccatcatcatcaaatgtttcatgcatcctcgccagaagaatttcccgcctgtttggtataacaatgcatactcattgcgttatcaaacggactgcccgtgatgtacttgcatactatgatacgacttccccggatattgcagactcccacaaaaaaatggttttcagagtgttagctgaactgagaaaatcagcccctaatactgttttttcgatgaagcatgttcccaataagataagacactattttccgccatggaaattaaatccggactttaattatacaattgacaacaatagcgttgtcattttagttgatgatctgttatcaaccggcacaacactgatatcagcctcctcagaactccgtaatgccggtctttcctgtactacagctatctgtttactgagtaatttatagcaacttgatgcatgaaaaaaagtgcgctacagtaagcgggtcagagagtgatttctgcgggagccggcatacgcccccggctcggtaaatatgaagcatttcgtcaggaatgcgggttcgcgcaggcaccttcggtgatggtccggtctgtaagagcaaaataatcacccggagaatggcagcgacattccccaacagaaaagttgtaaaaacctgataaaaaaagccacatttttatgtggctttttttattgctgttaatcagccgaataatttactcctgccccgaaaacgccgccgtctgcggcacatgttccgccagataattcagcagtgcctgcacagcaggtaacagccctttgcgggacgggaaaaccgcgtggatcacatcctgcgggaactgccagcccggcagaacacggacaagccgcccggcagtcaaatcattgagaaccacaccttccggcaggcgggcaatgcccagccctttgcatgccgcacggtgcagtgtcatgacatccgtggtggccaggcgtgccgtgagatgtttggtgatactgccgccgtcttcaccggtcagtgtcagcgtgtagttttgtttttgttcgctgttggcgaggatcgggaattctgtcagttcatccggatgctgcggtaccgctttcccggaaaacagcagcggtgaagcaaccaggatacgccgcgaataccccagcactttcatggtcagaccggaatcatccagcgggagggagcgcacccgcagtgcgagatcaaacccttcactgatcacatccaccggacggttaaccgccaggatctgcacatcaatatcggggtatttcaccataaaatctgtcagcagatcctgaagataggcctgtaacagcgcaaccggacaggaaaacttcacgctgccgcgcggatgtccctgtaccgagcagataatctcttcggcgatctccgcctcatcaatcacatttttgcattgctggtagaaggtttgtccgatctcagtgacatgaaactgccgggtggagcggtagatcagtgaaatattcagtttctgttccagatcagcgatacggcggctgagcctggatttcggaatgcccagcgcctcgcccgccggagaaaatccgccgtattccaccactttcacaaaataatagaggtcattcagatcgtatttcatgcctgtcacccgcagcgttatcctgcggatcagtatacataaaaaaatccgccgcattcagcatgcggcggatgtctgtgaatataaacgcaataatttagcggtaaacaatcccgccatcagtcagaattgcctggccggtaatgtaatccgagtcgtcgcttgccaggaaggcaaccagtgccgccacatcatccggagtctgggcgcggcccagcgcaataccatcgacatattttttgtaggtttcccctttcggtgcgccggtgatttcagagaaacgttcatcaatttccacccacatatccgtgccgacaatccccggacagtaagcattcacggtgatcccgctgctggcaaactctttggccgccgcctgtgtcagtgcacggaccgcaaatttcgtggcggaatagacgccgagtaaggcaaaaccatcatgcccggcaatggatgaggcgttaatgattttccctttctgtccgcgtgctttgaatttggccgctgcggcctggattccccacatcgtaccatcgacgttaatgcggaaaatacgatccatatcctccggcagcacatcttcaatggctttaacctgtgcaataccggcgttattgacgataacatcaaaaccgcccaatgcttgttctgctttatcaacaaccgcaaaaacctgatcgcgctgactgatatccgcagtgaataccgccgctttgcggcccagggcttccacttcttttttgactttcgccagcccttcttctttcagatccaccagcgcgatatccgccccttctttggctaagcgcagtgcaataccacgaccaatcccctgtgcagcgccggtgaccagaaccactttacccgttagtgccatgatgtgctccttatgagtgaggtatttcgttatgatattaatactcatttaaaaacatacgcgtttttacccgggttgcaagccggtaagcacataatgagcaactgccccgctctgtgacaacacatcgctgtaacaaaattcatcggagtctcattccgtaacattcccggcaggtttgccctgtccggcataccccccctccggaaaaaaacaatcagtatcatttatatattaataatttcagtgaatgtaactcaaaacgctgttacagactctggtgaagggattcagcttcccgttacaggcggataatccgaaaaaatcaatgtaaacgctttcttttgctgtgagatgaatcacaaggtcatcacgcgctccgggttaagatgacaacatgtttcataacgcctgatctgtaatttccgatgacatctatacaccccgttactatccgtgatgttgcaaaacgcgccggtgtctccgttgccacggtatcccgtgtgctgaacaatacggcggccacccgctcagagacccgtgatctggtgatgaaggccgtggctgagctggattaccggccgaatgccaatgcacaggcactggccagccagagcagtgatattctcggcgtggtggtgatggatgtggcggacccgtttttcggcgcgctggtcaaagcggtggatactgtcgcccagcagcacagcaagcatgtgcttatcggcaacggctaccatcaggcagagcaggagcgtcatgccattgaagtactgatccgccagcgctgcaacgccctggtggtgcattccaaagcgctcagtgacgcggaactgagtgattttctccgtcaggtgcccggcatgaccgttattaaccgtgttattcccggttttgagcaccgctgtgtcgggctggataacctgtccggcggggaaatggcgacccgcctgctgatctctcaggggcatcagcgcatcggttatctcggctccacccatgagatagaagacaataccctgcgttatcagggctatacccgcgccatgaaaaccgccgggctgaccgccggtgctgcctggtatgccgccggctcgccggattctgacggcggtgaagccgccatgatagagctgctgggccgtaatcaggcactctccgctgtgtttgcctataacgatgccatggcggccggagctatgtcggtactgaatgaaaacggtatccgtgtgccgcagcagttttccctgatcggctttgatgatattcccgccgcccgtttcaccactccgaagctgaccacagtacgctacccggtggtctccatggccatgctggcgacagaactcgccttagcgggtgccgccggaactttaccgccgccggagccccatgtgtttatgccgaccctggttatccgtcactcttctgcctaccggtgatatttctctatgtaaacgttttcaatctgtgagtctattcacagacggataacaactctcattttatgatccgggcgtttcctgacgttatcgtcatgtcccaggttctgccatcttcttaccggcatgccgttttatttataaattattattatcatttgccggaagaatgataaacaccgcccctgcctttcctctgaataacaggtggcgtcataaataaaaactgtaccctatcccccgacccggaggcagagaatgaagaagcattttgtcctggcaggcgttgccgccgccatgctgtttggtgctgcggcacaggcacaggctgatacccgtattggtgtgaccatctacaaatacgatgacaactttatgtctatcgtccgtaaagccctggaaaaagatgcaaaaaattcaccggaaatcacccttctgatgaatgactcacaaaacgaccagtccaaacagaatgatcagattgatgtgctgctggccaagggcgttaaagcactggcgatcaacctggttgaccctgccgccgccccggtgattatcgacaaagcaaaatccagtgatattcccgtggtcttcttcaacaaagagccttcccgcaaagccctcgacagttacgacaaagcctattttgtcggtaccgactccaaagaatccggggttatccagggtgaactgattgccaaacactgggcagccaacccggcgtgggatctgaacaaagacggtaaaattcagtatgtgctgatcaaaggtgagccgggtcacccggatgcggaagcccgcaccacctattcggtcaaaaccctgaatgagaaaggcatcccgacagagcagcttcagctcgataccgcgatgtgggataccgcacaggccaaagataaaatggatgcatggctctccggcccgaatgcagacaaaatcgaagtggtcattgccaacaatgacgcgatggcaatgggcgcggttgaagccctgaaagcacacaataaaaccaatatcccggtctttggtgtggatgcgctgccggaagccctttcaatggtgaaatccggggcaatggccggtacggtgctgaatgatgcggaaaaccaggcgaaagccaccatggctatcaccaaaaacctggcggaaggcaaaccggcagcggaaggcaccaactacaaaattgagaacaatgttatccgtgtgccgtatgtcggcgtggataaagagaacctgtcacagtttataaaataagcggtgattctttccgcccgcagcattcgtgctgcgggcgtgtccggaacgataacattagccaggtgtatgtatggccgacagctcaggcgaatatctgctggaaatgatgcatatcaataagtcatttcccggggttaaggcactcgataatgtcaatttacgggtacgaccgcactccgttcatgccctgatgggcgaaaacggtgccggtaaatccacattattaaaatgccttttcgggatttataaaaaagacagcggcagcatcctgtttcagggacaggaaatcgattttaaaggctcaaaagaggcgctggaacacggcgtgtccatggtgcatcaggagctgaacctggtgcttcagcgctcggtgatggacaacatgtggctgggacgctatcccgccaaagggttttttgtcgatcagaacaagatgctgaaagacacacaggccatctttgatgagctggatatcgatatcgatccgcgggaaaaagtccgcaatctgtccgtctcgcaaatgcagatgatcgaaatcgccaaggcgttttcctataacgccaaaattgtgatcatggatgagccgacctcctccctgaccgaaaaagaagtcaatcatctgtttaccattatccgcaagctgaaagatcgcggctgcggcatcgtctatatctctcacaaaatggaagaaattttccgtctctgtgatgagataaccattctgcgtgacggccagtggatctccacacagcccctcgaagggctgacgatggataacattatcgccgccatggtcggacgcacactcagccagcgtttcccggaaaaacagagcacaccgggggatgtcatgctggaagtcagaaacctgacgtctctgcgccagccgtctatccgcgatatcagtttcgatctgcatcagggggaaatcctcggtatcgccggtctggtcggtgccaaacggacagatattctcgaaaccctgttcgggatccgcgagaaatcctccggcaccatcacactgagagggaaaaccattaagaacaacagtgcgaatgaagccattaatcacggtttcgcactggtcaccgaagagcgccgcgccacgggaatctatgcctggctgaatatcagctttaactcgctgatttcaaacatgggcaaatataaaaataaactgggtctgctggataacagcaaaatgaaaagtgatacccagtgggtgattgatgctatgcgggtgaagacccccggtcatcacacccagataggctcgctgtccggcgggaatcagcagaaggtgattatcggccgctggctgctgacacaaccggaagtgttaatgctggatgaaccgacacggggtattgatgtcggggcaaaatttgagatttatcagctgattactgaactagccaaaaaagggaaagggatcattatcgtttcctccgaaatgccggaactgctggggatcacagaccggattctggtgatgagcaacggtgaggtcgccggtatcgtcaacacacgtgacacctcgcagagtgagattttacgtctcgcctcccttcacctttaaggatattaacaatgagcgcagcattaaataaaaaaagcttcctgtcctatctgaaggacgggggaatttatgtggttctgctggtcttactggcgattattatcattcaggatccgacattcctcagcctgatgaacctgagtaatatcctcacccaatcctcggtgcggatcattattgcactgggtgtcgcggggctgattgtcacccagggtacggatttatctgccgggcgtcaggtcgggctggcggcggtgattgcggcgacattgctgcaatccatggaaaacgtgaacaaagttttcccgcagatggaaacctggtctatcccgatggtgatcctgctggtgtgtgcggtcggagcggttatcggtttggttaacggcctgattattgcctatctcaatgtcacaccgtttattaccacactcggtaccatgatcatcgtctacggtatcaactccctgtattacgactctgtcggcgcttctccggtggcggggtttgatccgaaattctctgagtttgcccagggatttatccgtttcggtgattttaagctgtcatatattacgttctatgccgcgatagccgttttctttgtctggatcctgtggaataaaacccgcttcggcaaaaacatttttgccatcggcggtaacccggaagcggctaaagtgtccggcgtgaatgtcggcctgaacctgattatgatttacgccttatccggcgtgttctatgccttcggcgggctgctggaagccggacgtatcggcagtgcgaccaacaacctcggctttatgtatgagctggatgccatcgcggcctgcgtggtagggggcgtgtccttctccggcggggtcgggactgtgctgggcgtggtgaccggggtgctgatttttaccctgataaactacggcctgacctatatcggcatcaacccgtactggcagtacattatcaagggcagcatcattatttttgccgtcgcgctggattcactgaaatacgcgaagaaaaaataatcccgcagaaatgcaaaaagacccgcactgcgggtcttttgttttaacggtggtgaaaccggtttcagccttttttcgcggcctggagatagagcatttccagtgctatggttgcaccggccagtgccgtgatatcggactgatcatacgccggagccacttccaccagatccatcccgacaatattgagcggctgaaggccgcgcagcagtttcagcgcacgatctgttgtcagcccgccgataaccggtgtgccggtgcccggggcaaatgccgggtccagacagtcgatatcgaaggtcagatacaccggcatatcaccgacaatcgctttcacctgagcaatcacatcatccacggtgcggtcattgacctgcgcggcatcaatcacggtgaaaccattgtctgtttcatgctcggtacggatgccaatctgcacggaatgcgccgggtcaatcagaccctcattcggggcgtgatagaacatggtgccgtggtcaaacttgctgccgttgccgtaagtgtcggtatgagcatcgaaatgcaccagcgccatcttaccgaaatgtttggcatgcgcgcgcagcagcggcagagtcacaaagtgatcgcccccgaaagagagacattttttaccggacgccagcactttttctgtgtgcgcctgtaacttatcactcatgtcctgcgcatcaccgaacgcgaacaccagatcaccgcaatccaccacattcagacgctcgcgcatatcgaatgtccacggccagcggttaccttcccaggccagattggttgaaatctgacggatggctgccggtccgtgacgggaaccggcacggccggaagtcgccatatcaaacggaacaccggtgatcacccagtcagcgtcactggtgtacggctggaaattcagcggcaggcggagaaaaccaaacgcattagagaccagtgagttgtcggtctgattacctaatgtgctgttaatcataatgattcctttatcaatgtcttactgacacaaagccggatgtattatcccgccgggtattattcatcttccaaataggtgtaaccgtacaggccgctctcgaactcttcggtaaaggccttttgctcctcttcatccagatcagagattttcacctgatcacggaagcgttcgagcagaattttcggatccagcttcacatactgaagcatatccgccacggaatcgccctcttcactttccagatagcgcacctgaccgttttcgccgacatacacatccagtgctgcggtatcgccgaacaggttatgcatattgcccaggatttcctggtaagcaccaatcatgaaaaagcccatcatcggcggattttccgggtcataagacggcatcggcatggtggtcgccaccccgtcaccatccacatagtggtcgataataccgtcggagtcacaggtgatatccagcagtaccgcgcggcgatccagcggcttatccagcccctcaatcggcagtaccgggaacagctgatcgatcccccacgcatccggcagtgactggaacaacgagaaattcacatagaatttatccgccatacgctcctgcagttcatcgataatcggacggtgtgcgcggttacccggatcgagatcctgctggatacggcggcagatattcagatacagtccttccgcccaggcacgttcggtcagggacagcatgccctgcgcgtactgggtgtggatatcatgcaggtcgagctggctgtcgtgcagccattcgcgcagagagcgggtattgcccttgctctgcatctcttcccaggtttcccacaggctggcaaccggacgcggtgcgtcttcggcaggtgccgccacaggggagaactcgttgcgctccacaccgatcacattggataccagcacggtatggtgcgccgtcagggcgcggccggattcggtaatgactgtcgggtgtggcaggccgtgttcttcacaggcatcgccgatagcccagatcacattattggcatactcattcagcccgtagttcacagagcagtcagactgcgaacgggtaccttcataatccaccccgaggccgccgccgacatcaaagcactgaatattgacgcccaactgatgcagttcgacatagaaacgggcggattcacggacaccggtcgcgatatcgcggatattcgccatctgcgaaccgaggtggaaatgcagcagctgcaggctctccaggctgtctgcctgacgcagcatatcaatcagctgcagtacctgggtggccgccagaccgaacttggatttctcgccgccgctggcctgccatttaccggagccctgagaggccagacgcgcccgcacgcccaggcgcggtaccacatccagatttttcgcttcttcaagcaccacggcgatttcggacattttttcaatcacaagatacactttgtgaccgagtttctcgcccatcagggcaagacggatatactcgcggtctttatagccgttgcagacgatcacactgcgggtcatacctgcgtgcgccagtaccgccatcagctctgctttggaaccggcttccagtcccagcggctccccggcattgaccagggtttcaatcacacgccgctgctggttgaccttaatcgggtaaaccagaaaataatcacctttgtaaccataggattcgcgggcacggcggaacgcggcattaatcgaacgcagacgatgctgcaaaatctgcggaaagcagaataatgcaggcagacggatgtgttcccgctctttctgcacacggttgaccagctcagccagatcaacggcggcctgcggcatctccggattcgggcagacggtgacatgaccgaggtcattcacaccgtaatagctgccgccccagtatgcgatgttataggtctgctgcatcttcagcgcgatattatcattcattagtcatctcctgattctggagtgaaacttacctgtatggctgacatacgcctatcccccttcaccgtgggataaatctgtcctgttgacaagtaaaaattcaaaatggattacatcatccggcaaaaaccggacacagatttacgggcttaccgcagagtgacccgcctgcttgcgttatccggtctgtttgagtgtaacggatacggaaaacaccgcgcagagcacgtgtcagtcagagaggaagagagaacagaaaaagacgcggacacatgctgtaaagcacgtggctgttgaacgtcaacaagcagcagataatggttcattaacccatttacccccacacaggattacacacagtaacccccgcctgaatcatacagaaaacctgagtttctgccgtttataactgaagaaaaattcacagctactggccgcagtttataccggttatgacacaaaaatgcaaaatcaaaatgacggataagtgtaaaaaataaaaacagtcacgtaacacattctgaaaagtgaaaaaaaccagcggaaaaaccggaggcactataaaatttctggaaccactgccgattatacattagaatagccgtctagaagttaatacatccatcaatgtaccgaaagttcacttcacttaaggtagagaaaaataatgactacacatcttttcacttctgagtccgtatctgaaggacacccggataaaattgccgaccaaatttcggatgcagtccttgatgcgattttagaacaagatcccaaagcgcgtgttgcctgcgaaacctatgtcaaaaccggtatggttctggtcggcggtgaaatcaccaccagggcatgggttgatattgaggaaatcacgcgccgtactgtccgtgagattggctataccagctcatccatgggcttcgatgctgattcctgtgcggtaatcagtgctatcggcaaacaatctgccgacatcaaccagggcgttgaccgcgctgacccgcttgagcagggtgccggcgaccagggtctgatgtttggttatgcctcaaacgaaactgacgtgctgatgccggcaccaatcacctatgctcaccgtctggtcgagcgtcaggctcaggtacgtaaaagcggcacgctgccgtggctgcgcccggatgcgaaaagccagatcaccttccgttacgataacaacaaaatcgccgggattgatgcggttgtgctgtcaacccagcactctgaagatatctcacagaaagatctgcacgaagcggtgatggaagagatcatcaaaccggttctgccggtcgagtggctggatccgaccaccaaatatttcatcaacccgaccggccgttttgtcatcggcggaccaatgggtgactgcggtctgaccggccgtaaaatcatcgtcgatacctacggcggtatggcacgtcacggcggcggcgcattctccggtaaggatccgtcaaaagttgaccgttccgcagcctacgcggcccgttatgtggcaaaaaacattgtcgctgccggtcttgctgaccgctgtgaaatccaggtctcctacgcgattggcgtggcagaaccgacatccattatggtggaaaccttcggtaccggtaaagtctccaaccagcaactgacgctgctggtgcgcgagttcttcgacctgcgtccgtacggtctgattcagatgctggatctgctgcacccgatttatcaggaaaccgcagcatacggtcacttcgggcgtcctcagttcccgtgggaaaaaaccgacaaagcagagcagctgcgcgaagccgctggtctgaaataattccctgttatattaacaggcacaaaaaaccggcttttcagccggtttttttatgttctgaatccgcaaatacattatgatttactgcactgccgtgatgaatacagtgcaaaaatcaccatcccggcaatcattgacgcagtaaataccaaccctttgatactgagcatcccggataacacaatccctggtcccgggcagatccccgccagcccccagccgataccaaacagcagtgcgccggtcagcagccgtttatcaattttactgtttgccggtaactcaagcggcgtgccgcatacggtctttttccgctttttagccaccgtaaaagcaaccatactgaccgccatcgccaccgccatggtgatcagcagagaaggatcccagttgccggtaatatccagaaacgccagaattttctgcggattacccatcccggccaccagcaagccgaggccgaataaaattccgctgattaatgcagtgataacaggcatagcgcgtccttatttcatcagccagacagtcagaaaagcactgaccataaacaccgccacggcagcaaatgatcgttttgataaccgcgccataccgcagataccgtgtccgctggtacagccgttacccagccgcgtgccgaaaccgaccagcagaccagccgcgatcagcagcggataatccgccgcgatcaccacatccggctgaccggcaaacaacctgtaaacccacggtgcccctgccagcccggcaataaacgctatccgccaaccgctctgctttgtgaacatattggcgaaaatcccgctgattccggcaatccgcccgttaaacagcagcagcacagcaaccgcgatgccgatcatcagtccgcccagtgccgcactgaccggcgtaaaggccgcgctatcaataatcatattattttccttgtttctcaggacaataaagctgatacagcgtggtgagcaatatcagaactttttcatctgccacggaataatagatacgttttccctcacgccgggtattcaccagtccttcattgcgcagaaccgtcagttgctgtgacagcgtcggctgattgatgccggtccgctcctccagttcgctgacattgcactccccctgactcagctgacagagcagcagcagacgatccggattccccagtgttttcagcagggcagcaacgccggtggcggcttcctgcatatcggtaagctgtgttggtgtcatgaatttattccttacgacattatataattaaatataatattattttgcaacatatacaacatgctgataacggttgcagctttacgtcagtatcgctaagcttccggctatgaaaccgacccgagtccccaccgcattacaacaggcctgcatgcagaccctgcgtgattatctggcccgcgcctgccgggtgctgaagacggattatccggagcctgagctgaactatcgtcagcgcggcaccaccgccggcagtgcctgcctgcaaacatgggaaatccgcctcaatccggtgttactgacggaaaacggccccggatttatacaggatgtggttccccacgagctggcgcatctgctggtttaccgccgtttcggacgcgtggcgccccacgggcgggaatggcagtggatgatgacagaggtgctgggtgttccggccgtccgtacacaccgctttgatgtgacgtctgtccgctcccggacattcacctaccgctgccaatgcaaaacggcacatgaactgactgtccgccgccataacaaagtgttgcgcggggaaagtcagtacctgtgccgtcactgtaaaagtacgctggtgtgggataacagtgcggctgcaatatcatccccctgcgaccttacaccagatcagtcataatcagtttggctgtctcgaagtagataatcagcccggtgccgtcaatcagtgtggcaataaacggcgcggaaaccactgccggatccactttcagacgcttgagcaccatcgggataatggaagacaccaccgcactccagaccgtgatacacaccagtgtcagactgaccaccatcatcacttccggcccgacacccaggaaccacgcgcggaccatccccgcacatcccatggtaaaggcaaccagcagtgacgtggacagctctttgcgcagcaccgcgccgatattgcgcaggctcacttccccgagtgccatggcacggaccagagttgaggtgatctgagtaccgctgttaccgccggtgccgatcagcagcgggataaagaaagccagcgagatagcggcttccagctgctcctcaaatgccttgagtaccgtaccggtataggcttccgccacaaacagcatcagcagccagactgcgcgcttgcgccacagtgtgaacgggctggtgctcagataaggctcatccagcggctgggaaccgccctgtaatgccgcatcctgggtgttttcatcctcaatcagctccgcgatatcctgcggacgcagaataccggccagcttgccgaactgcaccaccggcacagtatcaatcccgctgttgttgataagctcgtacacgtcgtgccgggactgctccggtgacaccgagaaatacgtctggcgcatcacatcggcgacaaacatatcttccgctgccgtcagcagggttttgaccggcaggataccattcaggtaattatcctcatccagtacatataaataagtggggatctgctcaccttccagttcctcacgcagggtgcgtttgacggcagcaatcgtgtctgacacggtcacgcggatatacgcctgactcatgtaagcactgactgcgtcttcatcattacgctgcggacgatcggtatggtgtggcggattaacggatggcgcggaaatgaccagcgcgtccgctttttcgtagttggttaacttcatgatgtgtgaccctaatgtctgttatggacttcaaacagcactccaataggggcgaaaccagatgagagaatgcgtaggctatctcacgtctcggttttagcactatacaacgtatcccgcagactgcgggaagttacttcgggttataccttctgttcgatataacctgtcctaatcttgggcgtctctcgacgtcgtcagatcagcaacctttgtttgtataggagcctcgcctaacgagatactgcaccttaaatgcggcgcgaattataactctcagaaattatatggcgaggactattactatttcgtttagaaaccattgaagttacaaatcaggtccgggaacccagatcattatcgctctcatcaccggtcagttgccgtgtcacttcctcacagcggacaattttaccgtctgccagacggaaacaggcgaaaacctcaaaggcggcatgctcaccactgactttttctgccttagcgatatgctgagtgtgcacacaggatccgccttctgcgatggatttaatctctatggtaatactgcgggttgccattttcagggcattaagatgggcaagaaatgcgggaaactcaattgtctgaccattcaccacctgaacataatcacgggaaaaatactgttcaaccagggattcatcaccgatatgttcaccgagaacgtcagtcagggcgcgggttacaaactctgtcttattcattgctgaaaatccttttttattatgatcacatttacagcatagcggaaacccggcgtttatccgccggaaacagaaaaagcgccgctgaaaacggcgcttttttgcaattatacagaatgattctcaatcaggctaattcaacattgccctgaatctgacagctgcacgccagaacataaccctgttcaatctcttccggggtcagcgtcatggtgctggtggtggtgtattcaccgctgcggacgcgggttttacagctgccgcagacaccggcacggcaggctgccatcaccggtacactgttagcttccatcgccgccagcagggtcatgccgacaggcactttcacctgacgcagcggagactgaatggtcatggtgaccatctgctctccggcttctgcttccggctccggcccgaaacgctccataaagaagctgcccggatccacattcagtgcctgacagaatgtctgcacattcttcatatacggcgccggaccacaggtcatcacggtatgctgtgcgatatccgggatcagtgctttcagtttttcttctgacaggcggccggataacaattcatccgtctcatcactgttttccaccatcaggatcagacgcagacgggccgggaatgcagtcagcaactgctgccattcctgagcaaaaatcacctgctgcttatcacgcacgttgaaaatcaccgtcacctgactttccggctgacggtgcaggatccagcgggtcatcgacatcaccggtgtcacgccgcaaccggcggccagcatcagatagcgctcagccggacgggcatcacaggtaaactcgccctgtgcatcagacagccacaggtaatcacccggtttcacctcgccggtcagccagccggaaccctgtccgtcatccagacggcgtaccgtcaggctcaggaacgggctcagccccggtgtggaggataaggtataagcacgcagtgtctcatcactgttgcggatactcaccagcgcgtactgccctgcgtgatactgataaaaatcgtggttaatcagattgatagtccacacatccggggtttcctgcctgacagaatggacctgcatgcggttcggacataaagacgtcggcattgtcatcgggctctcctgactccgtgccggagaaggcgtgaccgccctctccggtgctaacagttacagcaattacgcgcctaacacagcgtgtaaatcattttcaacagtggtaatcggacgcataccgaatttttcattcagtacattcagcagattgtcagtcaggaatgccggagcagtcgggccggtgaagatatccttcacacccagcgccagcagggtcagcagaatcacaatcgctttctgttcaaaccaggagagcaccagtgtcagcggcagatcattgacgccgcagcccagtttctcagccagtttcaccgccagcataatcgcggagtacgcatcgttgcactgaccgacatcaagcaggcgcggtaatccttccagggtaccgaaatccagtttgttgaaacggtatttaccgcaggccagggtcataatcaggcagtcctgaggcacctgacgggcgaaatcagtgtagtagctgcgctcaccgcggctgccgtcgcatccgccgacgaggaatacatgacgcagtttgccggtagccaccaggtcaatcacggtatccgctgcattgagcagggtttcgcggccgaaaccgacggtgatcaggtgctcgatttcgctgtacgggaagccgtccatcgcctgagcctgcgcgataatatcgctgaaatcatcaccggtcaggtgtttcgcgcccggccagccgacgatactgcgggtccagatacggtcagtataactgcccggattcggatccagaatacagttggaggtcatcagaatcgggcccgggaatttggcaaactcagtctgctggttctgccagccgctgccgtagttaccgaccagatgcttgtattttttcagttccggatagccgtgtgcaggcagcatttcaccgtgagtgtaaatgttcacaccggtgccttctgtctgttgcagcagcatatgcagatctttgaggtcatgaccggagatcagaatcgctttacctgccaccggacggacgttcacggaagacggcgtcgggtgaccgtaagcttcggtttcaccggcatccagcatttccatgattttaaagttcatcataccaatcgccatggactggttgagcagctcacccatatcagacggatcagtaccgagccacgccatgatttcatggtactggccgtaaatctcatcactgtatttgcccagcacatgagcgtgctccatatacgccgccgcccctttcaggccgtacaggcagagcatacgcagaccgtggatatcatcaccgatagcctgcttatctttattcagggcaaattcatccgcctgtttcaccagtgacgcaatatccgaacccttcagttgcaggtttgctaacgggtgattcagaaccagtgccgggtttttcgccaggcagcgtttcatcaggctgtcacgcatcacaatcgcttcctgagcataaccgatgatgcgatcagaatcgaagttaacgttggttaatgtggagaaaaatgcacgcggcgcaaaactgtctgtgtcgtgatcgatgatacctgattcacgcgcagcaaacgcccacgctgaaagactttccagtactgccaccagcagatcctgtaagtcagatgtttctgcggttttaccgcacatgccctgggcataggcacagccattacccaccggtgtacgcatcgtttgttcacattgcacacagtacatgctcttgcttccttataagttgtattttatatgcaacataagaatacgccatttcagaccggtgaaaaggggttttcctgactatcattcctttgcttgatctaaagcaaaaattaaccggcacgacacatcactatcgcgaatgattaacatttacattatttacagatgcaatatggagtaaggaattgtccggtagtccggggtgaggcggcgtgatataaaccggtaaggtaactgaccagaggatgggtaaatgcacttgtatcctgatgcgggacgaaagaataaaacagaagcgggcacaaaatcatggtaaagaaaaaatatattctgttatttataatagccattattccgaacataatgaatgcgatagctgtaaaaaatatagaaataaaagataccggtattacagtaacagagaaccccggcgcaggtgaaataaatgcctgtaaacaatttataccaaccaaaaatcaacttctgaatttttttaaattggctgaagaagctgaatataataaatggctgcatgagtactattcgtcttgtatatcaaccggaagtattgaatttgagaatggtacatcaggtgattgggttatccagtcaagtggtattgcatcagtcattctggatgacggcagttcagctgattttttctataaagataacgaatggtatgatccgaatgcctgtacctatggtttaggtgatgatccaaatcctgatcccgggtgttaatcttttatatataacgggcggattaatccataaaaccgccctttccccgctaaaacagcaagatcatattcacagcaaaaatggttttcacagttatcatttaaatcccaaattctgaaccaaaaaatcagcatcttagtaactttccgttaaaaaattattgcgcatgggtaatagttattattatcatttgctttcctaaattctcacggaaaactgagtgatgactgactcctgtaacgcacaccaccgccctgcccgcctcactccgctggcactggcactcgcttttatcagcggtggcagtattgccgccaccgctgataccgaaaccccgctcgtcgttgtcggcaactggctggataacaccgataacagcgatacgctgctgaaccacggcggcgcacggaccatcaaaaccaaaaaacaaatcgatgaatccggggcggaaaccattgcggacgctctgcgcggtattccgggcgtccaggtacgggacagtaacggcaccggcggcagtgacgtttcactcaatgtcggtatccgcgggcttccggcacggctttccccgcgttccaccattctgctcgatggtattccgctggctgctgccccttacgggcaacctcagttatcgatgtcaccactctcattaggctccatcagcagcattgacgttatgcgcggtgccacctctgtccgctacgggccgcaaaacgtcggcggcgtgattaactttgtcactaaaccgatcccggaaaccttcggcggttccgcgtccgtcaaaacacagggtgcacgcaccggcgggctgaaaaccctgaccgatgcctctgtcggtggctcaaaagaagacggttctgcaggtgcgctgctgctctactccggtctgcacggccagggctaccgcaagaataatgacaataccgatattgatgacatcatcctgaaaacccgctatgccttcagtgacactgatgagttgctggcaaactttcactattaccatgcgcaatccgggatgccgggcggcctgacagaggcacagtacaaagccgatccttaccagtctgtccgtccgtttgaccgttttgaaggcaaccgtcaggatatgtcctttaaataccgccaccaggaagatgataaacagtttgaattactgacctggttcagcaaaagttaccggggcagttatattgaaagtgagggaacaaatgcgagtgccggtaagagccgccttgtttcctatccgcgtcactacacagcttacgccattgaaccgagctattcacagctgttccgctttgataaccagtcccacgaaatcaccctgggttaccgctatctgaatgaaacggcggatgaaaaagcctaccgctccggctggtatccgaccggttctcaaagctcacgccctcagaccgacagctactatcagcacacctccggcggtacagaggcccatgccatctatatcgatgacaccattaatgttggtaactggacggttattcccggcctgcgttatgaaaatataaaaattcatctcgatgacggtttccgtaaccagttccgcagcaagagctacagcgaaccgttaccggcactgtcggtaatttatcatattgatgatcagtggaagctgtttgccaacgcaggcagctcattcggcagcctgcaatatttccagctcaacaccggtggcgcgggtaatgatccggcaaacggcctgagtgcagaaaaagcccataactatgaagccggtacacggtttgatgatggtcttctttctgcggaaatgaccctgttctatatcgatttcaatgatcagctgcaatacattgaaaattcgaccggctggaccaacctcggcgcaaccactcatcagggggtggaactggcactgaattatgacctgagtgaaaccgcgaaatggctcgacggcgccagtatctacagcacttatacctacacaaaagcagtgagcaaacgcggtaattttgcggataaagatctgccgttctactcccgccagctctttactgccggtgcccgctatgaaaccggaaactgggtgtggaatctcaacacctatgcgcagtcaaaacagcagtcaccgggaaccgggaaaaattacattaccgaaggcagtgctgacgggcgttacggcattattccgggctatatgatgtgggatgcccgtgccgagtatcatttcggcccgcaatggtcagatctgacactcgccgccggggtgaaaaacctgttcgaccaggccagttttacccgctcgacagataataactacggcatttacgccggacagccgcgcaccttctttgcacaggcttccgtgaagttttaaaggtcattcatataatgaaacgcatattccacgccgccggacgttttccggcccttatcatcactctctgtgccgcactcgcagcactgttgccgctcagttcagcggcagcaccggttacagtaacggatatcgccgggcggactgtcaccgtcaatgccccggtatcccgcatcatgctggcggacagccgggtgctggttgcgctgaatattctgcatccgtctgaaccgctgaaaggcattgctgcatgggatgatgcactgaccaaaaaagcgccggacctgcgtattgcttatgaaaaacaatttccgcagctgaaagatattccggtatttccgaacccgtacacatcggatttcagtgtcgaaaaagcgctgacttatcagccggatctggtgattttcgataccggactgcaaagtaaactgaccgaaagcggcaccctggatttgctggaaaaaagcggtattccggtgatatttatcgatttccgtcagtatccgctgcaaaacaccatgccaagcatgacgcttttggggcaggtcttcgggcaggaaaaacaggcggcagcatttaatgatttttaccgcgagcggctggatcttatccgctcgcgggttgcaaatattccggaagacaaaaagcccaccgtctttatcgagcgggcggcgggtcttgccggggaaaacagctgttgtaaaacctttggtaacggtaacttcggggagtttgttgccgctgcgggaggtcataacctcggtgcagactggtttaaaaacggtatgggcggtgaggtgagtgaagaacagattattgccgctgacccgcagttttatctgatgaccgtcgccgactgggaaaatacccgcaaaggcagtgcttcagtaccgctcggctataccggctctgaggagcgggctgtaccggcactggaaaaactgatggcacggccgaaactgcagtatctcacggcgtatcagcagaaacaggtactggcactgtatcagcaatactatgacactccgttcaatattattgcggtggaagctatcgccaaaatgctgcatccggcactgtttcctgagctcgatccgcaggcagacagcctgatgctgcataaaacctttaccgctctggacggcagcggcctgttctggctgcaaccctgatcatcacatcagttgctgcatcagaaaaataacgggcagtttcctgcccgttatttacaattcccaccgttatttcttctgatataactcattcgccatatcaatactgtccgcattaacatcccggatgtggtcacgcgtcagacggtataccaccgggcttaataagatcagtgctatcaggttcgggatcgccatcatggcattcagggtatccgccagcagccagacaaactccagagactgtgtggcgccaatcggtagtgctatcagccacagcacacggaaaaccttaatcgccttcacgccgaacagatactggacgcacttctcaccgtaaaaactccagccgaggattgtagtgaaggcaaaaatcgtcagtgcaatcgccacaatatagtttccgcccggaatcgccgctttgaaagaggaagcggtcagtgtggcaccggtttccgctgtcagccagccgcccataatgacaatggtcaggccggttaccgagcagacaataatggtgtcaataaaggtaccgagcatggcgatcagcccctgacggatcgggttctgggttttcgcggcagcatgcgctatcggcgcactgcccaaacccgcctcgttggagaatacgccgcgcgccaccccgaaacggatagccgcccagacggtcgccccggcaaacccgccctgtgccgccaccggtgtaaaggcagaagtaataatgagggaaaacgccgccggaatttcactgatattcagcgcgagcaccacaagaccggcaccaaagtagccgacggtcataaacggtaccagtttaccggccacgtctgagatacggcggatcccgccaatcagtaccgcaccgaccagcagcaccagcgccacgctggtcacccatttgttgatgccgaagttactctccagcacatcagccacggagttggcctgaaccgtgttcccgataccgaacccggcacaggcaccaaataccgcaaacagtgttcccagccagacccatttcgggccgaggccgtttttgatgtaatacatcgggccgccgacatactgcccgtatttatccacttcacgataacgaaccgccagcacggcttctgagtattttgtcgccatacccaccagtgccgtcatccacatccagaacagcgcccccggcccgcccatcaccactgctgttgccacaccggcaatattgccggtgccgatagtggcggataatgccgtcatcagcgcgttaaacggggagatctgcccttccccgcgtgattcattgcgctgaaataataatctgaacccggttcccagtttacgaatcggcaaaaaacccagccgaatctgcatatataagccgacacccagtattcccaccagcatcggcacaccccataccacgccgttcagcgcgcccagccactctgttatcaaatccattcacccctcctgaccggccctgttacttttttattttacgcgtcacatacaagtaacatttatttatcatttattaataaagcggaaaaacgccgggaatgcgaacaaaaaatgtccggatttgcgttggatttttgaatctgtgaagggtgtcacttgtcacaaattgaattaaaatagtgattaatttttatttagaatggatcatgttcagccatgtcagatgctttaccgcatacgacagccacgcttaaacgccgttatcgtgtgctcaaacgccttaaagaacgcaatctcgcccctgttactgtcctgctgctggctgctgccgtcggcgcactcgccggttttaccggtgtgctgtttgagcgcggggtcaattgggttggtgaataccgggtcagctctctgtcttcactgacagataataaagaaatacttatcccgctgatgtttattgtttccgccctgctggccatgtcaggttactggctggtgcggcgtttttcgcctgaatccggcgggtcggggatcccggaaattgaaggggcattgcaggatgtccgcccggtacgctggtggcgggtgctgccggtaaaatttatcggcgggctgggtactctcggctccggtatggtgctggggcgtgaaggcccgaccgtgcagttaggggcaaatatcagcgggctggtcagtgcgctggccggggtgaaaaaccaggaatcccgccacacattgctggccaccggtgccgccgccggtctgaccgccgcctttaacgcaccgctcgcagggatcctgtttatcattgaggaaatgcgtccgcagttccgttacagcctgatttccatcaaagccgtttttatcggcgtgatcatgtcgagcattgtttttcagacctttaacagcggcgcgccgattctggatatcggtaaataccatgccgccccgctgaatactctctggctctatctggtgctgggaatggttttcggtgtgattggtgtgatgtttaaccgctttctgctcaccatgcagacacaattccgccgtttttatcaggataaaacatcccgttttgttgctaccggcggtctgattggcggactatgcggtattgccgggctgtactggccgcaggtaaccggcggcggattcgcggtgatcccagatgtcgccgcactgcactactccctgaccggtattctgatgatcttcctgttccgtgtgctcaccacggttatctgcttcagttccggtgcgccgggcgggatcttcgcgccgacactcgcactcggcacactattcggcagtttcttcggctatgccgccatgctgctgtttccgcagtatcagattgaaccggcgaccttcgccattgcggggatgggggcgctctttgccgccaccgtccgtgcgccgctgaccggtattgtgctggtactggagatgaccgataactatcagctgatcctgccgatgattatcacatgtctgggggcaacactgctggcgcagtatctgggcggacgtccgctgtattcggtactgctggagcggatcctgatgcagaacggcacgccgccggaaaaaaccggtgacgcgccgcgggggtaatattaatcaggcttttttgcgggcgatcagggtggcgaaattcagccggatccggttgcctgccgcatcagtgcggtgcagatgccccgggttttcgttgtatttcaggatctcccagtccgcataatagccggataactcgtccggtttcaggaagcagtcaaacggcagttcatcatacggcatattctctgtttccaccgggcagacaatcaggttatacccgtccgggcgggtatgcgcctgcatatcggcgatgatcgcagcaatattctctcttttcaggaacatcagcaccacagtggaaataatgatgtcgtaatcatcctgtaatgcatgctggttgatgtcatacacctgcgtgcggatattgctgatccccgcagcggctttcacatcctcaatcgcctgaatgtgctgcggattgatatccatggccgtcacgtcataaccgagctgcgccaggaaaaagctgttgcgcccgcgtccggatcctaaatcgagtgttttacccggttttgtcatcgtcaccagttcacggacttcggagtgcggacgggtcagtccgtggattttatagaattcatcttcaggctgacaccagaaggcaagctgacaggaaatatcatcactgacagattcaattttgtgccacacctgcgggtcaagacgcggcggctgatgcgtggtatcaaagtggtagcgggtctcttcgccgttttcaccgaaaacgacaaaatccatctcccccgccagaaccgtcagctgcgcccacgtaccttccgccgtattatggcgatccgtaaaggccatcgggatagtggttttttgccagaccggcagggttttatagcagactaagttttccattttacgcctcaccttaaagatgcattttaaatacatcttatatcctttccggtgaggcgtaaatgatttttatttctgacgggcgataacttcgtttatcccctgaaagacaaacggtttagcatcggtgaaatcctttgccacatcaccggaataaatgttttgctgttcaggacccaaatccagtttcttcactttgccgttttctttgctgaaatccactttcttcaggtcaacccagaagatattgggtgtcagcgccgattcaaagaaataaatctgacgtttgtgatccaccaccgtacgccagcgggtggaagagatattcggctcctcttcggtattcagcccgaacggcacagacacattgcggatcacactgaacaccgacgccaccgctttattcggcgtggtcgctttcggaatcgcattaatatagaaagacccgcgcgcaaaacgatcagcggaacggttggtacccggcagcatcacggtgccgttgatttgctgccagtagctgtccagtgccagctgctcgctgaataccggagagttggtcatcacctgatatttacggctgtgatgaatcacctgcttaccgtcaatatattcaataatggcgctgtcaccggaagcatcggataatgaaaggtgcagtgtcgccaggcgctcttcacccgggactttatcggtgatcaccgcgaacggctctttttccagcgcggtaaccgcctcttcaacggtagcatagttatccagcacatactgtgcccaggctgaaatactcagggtcggtttattgctctccggtgtcggatacacggattcgaccagccacagcaggtttgcggacaatcccttttcattaataccgtcggtggtggaaacatcatagccggatgccaccacactgccgtattttgacacccatttcacggaattcggcccggcagcaccatcacgcttcatcccctgcgggaaaatccataaattggtaccgacatcacttttccagtccattgaccgggcagtgatcacctgagcatcatccccgagatacaccagccgggtgcaggcggaagcaatctgcgcagccagtaatgtggccgacgcgaccgcaccggcaagtataattcgcttaaatgtcatgaaaaaccccttttcattgcgtccggcaaccggcagcttaccggttacacttccttattactgtagtccttatcaggattttgtggcaaacggcggccgggcaaaccagataaggacaatcaatccgatgaagacgccgccggagagccagaaaatctcattggcactgataatcagcccctgggcggtaatttccttcgccagataggcggaggtctgtgcttctgataacccgtgctgcgccatctcctgatacatctgtaccgattccggattatacgcggtgatggattccgtcagctgagaatgatgtaacgattcgcgacggctccacagcgtggtggtgatcgatgtaccgatagatcccgccagtgtccggaagaagttggccagtgcggaggccgaggccagtttctccggcggcagaccggaaagcgtgatggtggtgagcggcataaagaaacaggccactgcaaaaccctgcaccagctgcggccagaccgaggcatagaaccccatctgtggctcgaaagtataagcgcgccagtagaagcagacggaatacaccacgaaactaaaggttacaatccagcgtaaatccaccacattggaaattttaccgacaaacgcggaaatcagtatcggcaccagcccgataggcgccagcgccagccctgcccattccgccgtatagccgtacacctcctggagcagctgcggcagtagtacaattgcgccgaaatagaccatatacgccagactgaccgacagtgtgccgatggtaaagttacgcgacttaaacagcgacagctcgacaatcgggtttttatccgtcagttcccatatcaccaggaagaccagcgcaacggcggcaataatcgccagtgcgacaatttcatttgactccagccagccgagatctttccctttatccagcaggatttgcagacagccgatcccgaccaccagcagcgacaagccaatcacattgagcggaacctttgtcaccttcgattccataccacgcagcagcatcaggctgacaagcaccaccgcaataccgataggcacgttgataaagaaaatccagccccagtggaagttatcactgatataaccgcccataatcggcccgaacaccggcgccagaatgatggtcatcgaccagagagccagcgcggtattctgtttggcaggcgggtaacttttcagcagcaggctttgtgagagcggaattatcggcccggccaccccgccctgtaacacgcggaagaaaatcagcatttccaggctttctgataacccgcacagcagtgacgtcagggtaaacagcccggtggaccagataaacacccgtacttccccgaagcgcttggccagaaacccggtaatcgcgatggaaatcgcgttggataccccgaacgaggtaataacccaggtgccctgtgagacggaggcaccgagatcaccggaaatggtcgggatcgccacgttggcaatggtggagtccagcacctgcataaaggtggccatcgacagcgcgatggtcgcccagaccagtttcatgcctgttaatggttgattagccacaataaagccccgcgctgattaactggcgttatcggtaatgatttgtgcaatcaccgcattgaccggtgccagatccgggatcagcacatcactcttaaaggccggggtatcacgctggacattggccagtaccgggccatcggtatttttggtttcgatggtcacgttcatcgataacccgatacgcagcggatatctggcaacctgctgcggatccagctcaacccggaccggcagacgctgcaccactttgatccagttcccggtggcgttctgcgcaggcagcagagagaaggcactgccggtgcccatatccagcccggctaccgtgccgttaaaggtcactttgtcgccgtaaaaatcactggtaatggtgaccggctgcccgatgcgcacactgctgagctgcgtttccttaaagttggcgtcaatccagaccggctcgaccggtacaatcgccctcagtgaggcattcgggctgacctgagccccgacctgtacgttgcggcgggagacatacccggtaaacggactgcggatttccgtgcgctgtaagttaatccaggcatcacggactttatccgccgcctgtaacaccgcaggctgatccgccagcgccgtggttttcagcagggctttggtggcattcagttgctgcacagacgcattcagggatgcctgcgcctcttcaaccgcttcccgtgagtgctgtaaatcttctttggagatagtcccccgctgtcctaacacactgcggcgggcatagtcattctgcgcctgattcagcatcacttgtttctgggcgataaccgcaccgagctggtcgcggttaaaatagagttcctgagtctgccgcaccgtagccgccaggtcatgacgggcctgcgcgtaagccagttcagcattggttttatccagcaccaccagcacatccccggcatgcaccagatcggtattctcaaaattcacctgtgttacattaccggtggtttgtgcgacgatcggcacctgcaggcccaccacgtaggcgtcatcggtatattcctgataacgcagcaccatgaaccagtaaataagatagccggcgagcagcacaataaagagaagtgacgttcccgcaagccagatttttcgtctggcgggattggatgacgatgtttttttgtcagaaggctgggcagcagaagactgcgctgatgtgttgtccatcaaaataccccggtaataaagttaagccaaaaatattgcgcacagaatagcctgaatcactataaaagtaacggtaagtgaaatattacaggggaaaaccgaaaacaatataaacagaaacaaaacatctgctgaacacaataaaatatgtaacttatttatctaattatgatgaatgacaaatgaatataaggaaataatcagatatttaagtaatatccgctgcatattttgatacttatttctgtactcactgcgacagagacagaacacataaaaaacgattccggtaaaaaccccctgattattcgtctgcccggttcattttcgggtatcagagtattttctgtttacctttcccgattcttaaacaaagtatcgtgttttactgaaatgtgtttgttttttatccggatacagaaaacagcacgatttgcacattttcgtttctgtccgccggacataaaaaaaccgcagagtcataaacgctgcggttattatccggtatcctgagatatttactgagacaaaatcagacgcagcgcctccgcggtagccgctttattcggttctttcgtgaataagtcataaaaatcgccgacaatcagacaggtagtgaccgggtcttccgcacctttattcaggtcactcagcaacatcactttatcaccgtatttttctgacagcttctgataaacatcccctaataccttataagcttcctgcgccggaacattaccggtattccggtcttccagtgatgatgtcaggatcagattcacggttttcagcatccggatatcggcttcgttataggtaaactgtgctttattctgcgggaatttattcagcgccgggaaaaagttattaaaacactgctgtccggacggatcttttaccagataaccttccgcctgctcttttaccgctccggcgaaggcattcagggcatcatcagaggcatacgggatccggtcaattaataacactgccgtcatcccggcaatatcattcatccatgccactttctgctcgcgggtcatggtgtcatagttcctgatattactcttcaggcccttatatttttccggggaaattttgccgaccacttcaacaaactgcatcgattccgacatcatctccgcttcaagtgatttttgtgtcgccacaccgtctttactgacggcggtgacagaaaaaacattatcccgcttacccatataataaccggcaccggcaaagaccacggcaacaataagaaccaataataagctgagttttttattcacgcactttcctctgatacgctgagttatcactgaaagtgatagtgacacaaattaataaggcctgctattgcaggccccgataattgttcagattgtaaaaacaatcagatttttacgccttcaacggaaataatcagttcagcatcctgagacttcggtcccagatcggctttaatattaaagcttttcagtgaaactttccccgttgcctcaaaaccggcgcggtaaccaccccacggatctttgccttcaccggtcagttttgcatccagagtgaccggattggtcacgccgttcagcgtcagatcaccggtgataataaagtcgtcacctttcttttctactttggttgaaacaaattttgcttccggatttttttcggtattcaggaactcactgccgcgcagatgtttatcacgctccgcatggttggtatccaggctgccggttttgatggtgacatccacgttatcctttgccgggtcggccttatcaaaggtaaatgtgccgtcaaaatccttaaatgtcccgtacagccagctgtaacccaggtgctgaatacggaactgcacaaatgcgtgctgcccttctttgtctatcttataggtgtcggccattgccgcaccggaccccagcagcatcatacctgcgcttaaaccaaccagtgctttcttcagcatcatattcactccgtcataataaaattacgggcagcccgttcagggtttcatacccagcatgcgttttaatgtggcgtctttatcaaagaaatgatgtttcagtgccgccagcgcgtgcagcgccgataacacaacaaccgaccaggcaaggtacaggtgaaccgtaccggcggtatccgcctgctctgcgccgtctgtcactgtggccggtacatcaaaccagccgaaaaccgatatcgcctgaccatttgccgttgagataaaatagccggtgatcagaatggcaaacaaaataccgtacagcagccagtgcgccagtgcggcgctgatgcgggtaaaccggctgtaagtggataatgccggcggcggcggggaaagccagcgccagatcatgcggacagccagcacaataaacagcaggatcccgatactcttatggatttccggtgcacggtgataccagacatcatagtaacccagcgaaaccatccacagccccagagcaaacatcccgtaaacggtgattgccacgccccagtgaagcagaacggagaggtgcccgtaccgttgtgcactatttttccattgcattgataaataccctttgctgttccatacggataacatttcagtaacagcgggatactttacgtgatttttccggccatatcggacaaatattttgtttaagtcaatcaaaataagtcaataacttattaatttaattgtcatttttataccaaaccaaaatattgaaccagaaaaatcttatatagcgggattttgtaagactgaattggactgagttataaccagaatgcaggaaaatccgcaatccggcggatatcaccaaaaaataattttaatatttaaaaatatttttgataaaaaagttgacgagcatcacataagtgctatgatacatccatcgaagcaaaacagcttaccaacctaattcaaaagcaggagttcattatgaaaannnnnnnnnnnnnnnnnnnnnnnnnnnnnnnnnnnnnnnnnnnnnnnnatcagacagatacagaaaaagcgcccgatgggcgctttttttatacctgcagctcaccggttaccatgagctcagcttaaattaaaaataattttaattcattaaaataaagtttatataaaatttgacatccgtcacaaaaatggtatagtagcgccatcaaagccaaacaggcttaatcacttactcaaaagcaggagtttattatgaaaagcatcaaaactttcttttcttatctgacccgtgctgctgctattattgctaaaaacagcaaagcattctgataaatcagacagatacaaagaagcgcccgatgggcgctttttttatgctgctttattttgccagcggcgcaaataaccagcgcaaccaccagcgggctttccagcccggatttttctcccggactaccggtgatgtacggcagaccgaccgcagaattttccattcaaaatccaggaacaaccgggaatggccggattccgcaccatacgtgcagacttcctcatgcttgcgtttatcaaccggcgtgttgtattccagacttctgtccagcgtatgataagacttatcacgatccacaatccgctctgtggcatacaccgatttcggcagatagcgctgacgggagccgtgatatttctgcagtttcacaaaacggtaatcttccgcgccgtaatggccgcaaaactcttcatcataaccgtaaaaacggaagaagcgggcgcgggacataaagaacagattggaatgccctttacggagattcccctgctcaccccggcggtagagtttatagaatgtccggcccgggtttgccgcattaatcagataagtgaacgtcgaaaccggcaggacatgatccaggtcggtcatcagaattttatctgacgccgcataggtcacccccagattacgggaaccgccctggttccacggaatatcggttgtgatccgcagccatgtcagatttaaattaaattcaggaatttcatactcaagcggggagcagtcatcaacaatgacaaactgaacatagtccagcacggatgccggcatgctttcatattcacgaagcaaattgataacttcagaaatatcttgctgattacaatagaaatgagtgatgtaagtaagttttatatgttgcttatccgcaacttttcggaagaattcgcgtgacattatacctgtgaccctgttaccacaaatgaccgaccggcaattagcaaccagtgcgatgttaattgccggctattctcacatacaggtggtacggtgtcactacttagcggggataaactattcctgatcgaaaaagtaatccaccggaacatggaacatttctgccagatacatcagataatgtatactaatccggcttgttccccgttcataacggttaaattgctgctgcgttattcccatgtcttccgctaaccggacgacacttaatcctaagtattttcgcttttctttaatccgtgttccgacacaggaatatatagattccgtctccataagattctccttcacttatattgacaacgtgataacaaaaaattccgttttttagagtctgccatccgcttacttaccagtggtacaataagcccataacagcatgaaatttaaaaaataaaaatcaacagttatgaataaccgacatcttcagtcttagtaatcgggatttaaccttataggtgtattctttgcaatatcaatacgtctgtttaatgtaataatacctacccgatcacaattaatatcaaaatagggtcttaataagattaaaagtatttctgaaaaataccgttcactgaatatcggttaataatataccccgatatttcataaaaataattgcgtgaaaatacttaagaaatatttacattatttccttatcacctgcttaagaaaggctatttccggctatgtgttagttgcatcacagaaaaaatacatatgtatagttataatttacatatgtagccatttatctctgtttctgaggttatcttatgacgcaacaaccccctgccggatataccccgctaacctgtgacacccttcctgcttacctgtccgcacatttaccggatgatattttacccggcggtacgccggaatcctggcagacagaggaagtcggtgacggtaatctcaatctggtgtttattgtcagaggcagtgagcggactctggtggtcaagcaatcactgccgtatgtccgtgcggccggtgaatcctggaaactctctttgcagcgtaattatttcgaataccatgcgttgtcacaggagaaacgtttcgcacctgacagtgtgccggatgtctatttctatgacgaaaccatggcactgtttgccatggaatatctcgctgaccatatcattctgcgtaaagcgctgatcgcaggagaatatgtccctcagctggcggaaaaaatcggccgctttatggcgcaaactctgttccatacctcggatatcggcatggcggcacaggagaaaaaagccctgaccgcgcagttttccgccaaccatgaactatgcaaaattaccgaagatctgatttttaccgagccttacttcccggcaccgcgcaataatcacacctctccgcagctcgatcgcgatgcaaaagccgtgatgctggacagggaaatggtgcaggtcgcgatgcgctataagtacaaatttatgacacagtcacaggcgctgctgcacggggatttgcactccggctctgttatgatcggcactgattctgttcaggtcattgatcctgagttcagttttatggggccgatggcgtttgataccggcaactacgccggtaacttatatatggcctggttttctcagcccggacaccgggagacagaggaagagaccgcgcgctatcagcaatggctgttatcgcagataagccagacctggaatacgtttgagactgaattccgtcgtctgtggacagaaaaatcacagggcgatgcctggccgcgtgagctgtaccaggacggcatgtttgatgacaaattcctgaaagccgctcaggacagcttcttcacagagctgtttcaggacaccctggtcaatgcagggctggagatcaaccgccgcctgctcgggtttgccggagttgctgatttcaaaaccattactgatgcggacaaacgcgcggtacttgagcgcaaagcactgaaactggcgcgggagctgattgtcaacgcgcgccattatcacagctttgccgatgtcgaagcctttctttcttattgttaagcatcacctgcacacgaggttatataatgaaaattaacggaaaacattaccgttccgtctggcccgcagataatggtattgatgtctgtatttttgatcagacaaaactgccttttgaagtcagtatcatcacactgacaacgatggaggaagccgcaacctccatcaaagatatgtgggtacgcggtgcgccgctgattggtgcagtggccgcttacggtgtggcgctggccatgcaccgtgacagcagcgatgccgccctgacaaaagcgtatgacgtgctggttgccacccgcccgaccgcgatcaacctgaaatgggcgctggacagaatctgtggtgccctgacaccacttcctgcagctgagcgccgtgacgccgcttaccgtattgccgcagaaatcgcggatgaagatgcggaaatctgtcaccgcatcggcgaacatggcctgacgattatccgcgacatcgctgcccgcaagaaaccgggcgagccggtgaatatcctgacccattgtaatgcaggctggctggccaccgttgactggggcactgcgctgtcaccaatttatcaggcttatgatgaaggcattaatattcacgtctgggtggatgaaacccgtccgcgcaaccagggcgggctgaccgcctttgagcttggctcgcacggcgtgccgcataccctgattgccgataatgccggggggcacctgatgcagcacggcgaagtggatatgtgtattgtcggcactgaccgcaccaccgcacgcggggatgtctgcaataaaatcggtacttacctgaaagcgctggcagccaaagcgaacaatgtgccgttttatgtggcactgccgtcaccgaccctcgatttcactgtgtgggacggcgtaaaagaaatcccgattgaacagcgtgccggtgaagaacagtcacatgttttcggcatcacaccggaaggcacccgcagctgggttaacacggctccggccggaacacgctgcggcaactatgcctttgatgtcaccccggcggagtatgtcaccgggcttatcaccgaacgcggcatttgtgatgcctccccggccgggctgaaagccatgttcccggagatgtggccgtctgagtatgaggtgtgatcatgacccgcactgaactggcacagcagattatcgatacctgtctgaagatgaacgcaagcgggctcaaccaggggacgtccggtaatgtcagcgcccgctggcaggacggcatgctgatcaccccgagtggtgtgccctatgaaaaactgaccccggacagcattgtgtacatggacagcaccggacaagcagaggcggataagatcccgtcgagcgaatggcactttcacctgagctgctatcaggcgcgtcctgagctgaatgcggtggtacataatcatgccctgaatacagcggcagtatccattctcaatgaatccattccggcgatccattatatggtcgccgtcaccggtaccgaccatgtgccctgtgtgccgtatgccactttcggtacgcatgaactggccggtatcgttgcggaaggaattaaaaccagtaaggccctgattatgcagcatcacggcatgctggcgatggaaataaacctggaaaaagccctgtggctggcgcatgaggttgaagtgctctccgcgctgtatctgaaagtccgggccatcacaccggatgtgccggtactgagcagtgaagagatgcagcgggttcttgggaaattcaaaacctacggactgaaaaccggaaaatagtaattaccggtggcagaaaacggcgcaatgcgtcgttttttgtcaccttacgtaattaattattttaaatgataatcatttgcaatataattaaaaccttaatgtatctgttatttaaggtttttatgaaaaaagtcatttgttatactgcgtttgcttctgccgttcttctcctgtccggatgtgccgccacaaagaaatccccgcaattcagcgaaaaaagcattgaagagtgcggccgctatctgccggacggcattgcttactatgtcacgattgaaggcgaagtggatttaaacaagcagtttaacggtgatatcaatgtgaccgcattgcaggacagtgcacccgctgttgcatttaaccacgagctgattcaggccggtgcggataaatatatggactgtgctattcagctgctgaataacggtaagggagatacccgcacaccggaagaaaaagcggcggcagaaaaacagtaaccggcgatagtgatgctctgatgtaaaaaaaccgccttccggcggtttttgcacttatttatctgacagcaaatgtgccgcgatcagcgggtcaacaatcaaatcagaaacatatccgccacgcagtgccccgcgggtggcggcgatattttgttcaccggtggcgataaaaatccgccgtgcaatgttgcgcagctgcggcagccggataccgaggatgcgggcatccgtatgggtatccagcggctcacccgcctgatcataaaaacgtccgcagataaccccgactgcccctttgcggcggaaatcggtcatttcctctgccgtgatcacgccggcacggatcagcgggttctcttccgtgacatttccggccacgaacagcgctttggtgcaacgatccagctgagcaaagtttgcctgaatgataggctctctgcgcagtgcatctgccagctccgcagagctgacaattgcgggaacatgcagatacgcacactcaccgccgaactttccggcgatcagcgaggacgattccacggtggtgaaatccggctgcgacggcacggagccgagcatctgtaataccgtcatattgcggatgactttcggtgtcagacacttcgccatatggtgaattgtccgtccccaggccacgccgagcacatccccgtcttcaatcacctgactgagatacaccccggccgcctgtgccatgttttcccggcggcgggcggaatctgccgccgcctccgcaaccgggctgtccggcaccaccagcacattggtcagattaaacttttttttcagtgacaacgccatatcgatgcggctgtaacgcgccatatccaggctgatatgcaccacaccgttttcccgggccgtctgcaggtatttcaccacggttacgcgggaaattcccatcgcatcagccacttccgtctgactgagaccggactgataatagagccatgcggcctgcagaaccgggtcattaccgaacatcaggcgtccggccgggcggttgtcactgtttgtcatgcttcgcgcaccacgctgccccagagatcatactcatcggcatgttcaatatttaccatgacaatatcccccggctgcacatcaaattcgccgttgagatataccataccgtcgatttccggcgcatccgccatactgcggccgacagcgccctcttcttcatcaacttcatcgatgatcaccggcagtgtgcggccgattttttcagccagacgctctgcggagatctgctgctgtaactgcataaagcggtgatagcgctcttctttgatctcttccggcacctgatccggtaattcgttggcatgtgccccttccaccggactgtatttaaagcagccgacgcgatccagacgggcttctgtcaggaagtccagcagcatctgaaagtcttcttcggtttcacccgggaagccgacaataaaggtggaacgcagtgtcagttccggacagatttcgcgccagcgtttgatgcgctccagtgtgcgctcaacagcacccgggcgtttcatcagtttcagaatacgcgggctggcgtgctgtaacgggatatccagatacggcaggattttgccttctgccatcagcgggatcacatcatccacatgcggatacggatacacatagtgcagacgcacccacacgccgagctgggataactgctcacacagaccgatcatgctggttttcaccggcagaccgtcgcggaaaccggtgcggtgtttgatatcagcgccataggcagaggtatcctgggagatcaccagcagttctttcacaccggcttcaaccaggcgctgcgcctcactcagcacctcaccgacaggacggctgtccagatcgccgcgcatggacggaataatgcagaatgtgcagcggtgattgcagccttcagaaattttcagatacgcgtaatggcgcggtgtcagcttcacgccctgctccggcaccaggctggtgaacggatcatgcgccggtttcggcacatatttgcggacattcgccagcacctgctcataactgtgcggaccggtgatttccagcaccttcgggtgcacttcacggatctggtcttctttcgcacccagacacccggtcacgatcactttaccgttttccgccagtgcctcgccgatagcttccagggattcctgcacagcactgtcaatgaaaccgcaggtattgacgatcaccacatcggcatcatcatagctcggcacaacctgatagccgtccgtgcgcagttcagtcagaatccgctcggaatccaccaggtttttcgggcagcccaaagacacaaagccgaccgtcggaactcgatttttattgctcataagtaatatagtatgttttatagtcagaataaccggtggaggattttagcactgaaaaaagacaaaatgtacttttgcatcgggttggcagataaaaataagcgaaaggagcaataaacagcagcgccggataaaccctgtctttgaataaacctgtttaagcacgcaatcagggctcctgtcatcaatttatattaagtgatgataccggcaaaataataaaaaatttatgccggttaccggtttgccgttgacattaagcgaccacaccagccaaacttaagtaaaatttaatattgtcagcagggaagtggcatggcgaatgaaaaatatgatccgacatggagcggatatatgggagattacctgcgcggaaagacagggatcaaccagcttaagcctcagcatgaattttttgatgccatcgggcttgaaaaggcactccgggataatgtgcactatgaggcgctgatttcagcagaacaggccgttgaaattcttgaggatataaaaccaccggaaccagtcaacagtggtgacagggatgcaatgcggcgggatcgcaaccgccaggcaaacccgttttcaacaatttttaagtataccgatcctgttgcaccttatgccggtactattcatgacacccccagcgtgattaagcttatcggtgagttcagatcattaggcattaacgcgaaagaatttacggctgcaaacggaaaaacctatatcagaatatcaggccatgccggtgtcagacggatagtgaccggaacccgttacggcgcaaatcacccgacgatgctgaatatggggatcggtatgcagggcctgaaagacggcattgtcaaaggtgttaaattctgtttggttttctcatttatttacagagggttggaatgggcatttaaggatgagtatcattttgcagatttcttagggaatgtgacagcagatatggccaaaacagctttagttgctgcaggatcctgggctgtgggagcattttatttatctactgtagctgtcggggccagtattattgctgttggttttatagtccttcttgttggctttggcatcacagttgctttagactatatagataaaaaatatggattaagtgaaggtattattaaatatttaaaagaagagtccaaaagaaagccaagaactactgaagctgatataaacaaaatcctccattcattcccaaggagttaaaaatgccaagatggggaaaagtaattgtatccgtgcttattttcattatagcaatagctattagcacactagtttacgattacatcatctcattatttaaaatgagggatgtaattgtattttccggtccaattgcgattttatcgttagggatgccatttttactctatgtgtttttttcaggtatgattgaattttcatttggtcaaaaatcgttttttttcacattactaatgaaatataacaaattaataatgagaggattgttatatttaagcattatcggattatttatcagcttccctgtttcctttgccgcaaacatttaccttatcgacaatggctataaaacatgtgaaaaaatctcatggatgtcaccaaccacttatgtaaaagagttatcgctttgtgacagatagaacagcaaactatgttttatatcgcagaaactccacaaacaaatagtaaatataaactgagataaaaggttattaactatatgagaatggaatcaaaaaaagcacggatgcatcagggtgatgtcaataaaaaccttcactcatggtcgggagcctgattatgccacgctgggtaaaagcaatagtatccgcaatgtttttcacactctcattggctgttagctttctgatgtatgattatatgatttctttattaaagatgcgaagtgaaattatattttccgcaaaaaacttaatgctaacatttggactcccgtttacattatacgcttttttcggaatgacagttgaactttcctttggtgataactcaatattttacaaggtcatcacaaaatataaaagtataataatgaacattacatattacttatttctcattggtcttattgcaggcattcctatctcctttgccgtaaacatccaccttctcgataacggctataagacatgtgacagaatctcatggatgtcaccaaccacctatgtaaaagacctgtcgctttgtggcaggtaaaaaattatcagtaaacaaggtagcggttctgtcccatccgtccggcaagattctgttgcaattcgtgcaatcccccggcgctgtattctgccgtttacagtgaatgtgatatatacggcagctttatcctgctgatccggttatgctttctttgccagcatttaatgtcatcgttgtgaaaattaaaagcatcattatttgcgaacctgatattgaaatgctgctgttgtgcttatctcattattttccataagaagggtaatcacggtatctatgcaaaaatcaaaacgtaaaacgtggattttttatctcatcctggtcattgtccttgccggcggcggctacctgttccgcatgctgcaaagccccgggctgcctgcgggcttcgctcagagcaacggacggatcgaggcaacggaaattgatatctcaaccaaaaccgccggacgcatcagtaccatcaatgtcagagagggggattttgtccgcgccggggatgtgctggcgcagatggatacccggactctcgaggcgcagctgagcgaggctcaggcgcagtaccgccaggcggacagtaatgtgatttcctcgcgctcggcactggctcagcggaaaagtgagaaagctgccgcagaggcgatggtacgtcagcgcaccgcagaactgaccgctgcgcagaaacgtctgacgcgttcacaggcactggtgagaaccaacgcggtatctgttcagcaggtggatgatgacctggccgttgtccagggtgcccgtgctgccgtggaagcggcgaaagctcaggtggccgcggcttctgcggcgattgatgccgcacagtccggtattatccaggcgcagaccaaagtggatgccgctctggcgacacaacaccggattgaagcggatctggatgacagtcagctgaaagccccgcgtaacggccgtgttcagtaccgtgttgccgaaccgggtgaagtgctcggtgccggtggccgcgtggtgaatatggtcgatctcagcgatgtctatatgacgttcttcctgccgaccgaacaggccggacaggcgggcatcggcagtgacgtgcatattattcttgatgccgctccggacctggtgatcccggcgaaaacctcgtatgtcgccagtgtcgcgcagtttaccccgaaaacggtggaaacggataatgaacgccagaaactgatgttccgcgttcgtgcgcgtatcgcccccgaactgctggaaaaacatctggaatatgtgaaaaccggtctgccgggacgcgcttatatccggctggatccgaagcaggactggccggctgacctggaggtgaaattacctcaatgacatcatcaaaacagcattctgacaccgcaatcgtcaccctggaacaggttacgcatcattacggtgatgtgtgcgcccttgatgatatcacgctgaacatccccgcccgtcagatggtggggctgatcgggccggacggtgtcgggaaatccaccctgatttccctgattgccggtgcccgtaaagtgcagcagggtaatgtgatagtgctgggcggtgatatccgcgaagaagagcaccgccgcgcggtgtgtccgcgtattgcctatatgccgcagggactgggaaaaaacctctatcacaccttgtcggtgtttgaaaacgtggattttttcgggcgactgttcggccagtcagaggaagaacgtcgtctgcggattgatgaccttctcgccagcaccgggctcgccccgttccgcgaccgcccggcgggaaaactctccggcgggatgaagcagaaactcggattatgctgcgccctgatccatgacccggaactgctgatcctcgacgaaccgaccaccggcgttgaccccctctcccgcgcccagttctgggagcttatcgaccgcatacgcgaacgccagcaaaacatgagtgtgctggtggcgacggcctatatggaagaggcggaacggtttgatcacctggtcgcaatggacgacggcaaagtcctggcgacagggcacgcccgtgaactgaaagcgcagacacagactgatgagctggaagccgcctttatcgccctgctgccggaagaaaaacgcaaagatcacaaagcggtggtgatcccgccgcgcaaagcgcaggacaatgaagagattgctatcgaggcacaggatctgaccatgcgcttcggcagtttcaccgccgttgaccacgtcagtttccgcatcccgaaaggggaaatctttggtttccttggctccaacggctgcggtaagtccaccaccatgaaaatgctcaccgggctgttacaggccacggaaggcaaggcatggctgtttggtcaggaagtcgatccgaaagatttgaatacgcggatgcgggtcggttatatgtcgcaggcgttctccctctacagtgagctgacggttttacaaaacctggtactgcacgccaagctgttccatgtgccggaaaacgaaattgatgaccgcgttgatgaaatgatgacgcgctttaaactgacggatgtcgccgatgccatgccggaagggcttcccctcgggatccgtcagcgtctctcccttgccgtcgcggttattcaccgcccggaaatgctgatcctcgatgagccgacatccggcgttgacccgattgcccgcgatatgttctgggatctgatggtggatttatcacgcaaagacggcgtgacgatttttatatccacccactttatgaatgaggctgcccgctgtgaccgcatgtcgctgatgcacgccgggaaagtgctggtgacagatacccctgagaatctggtcacccacagccaatttgacaccctcgaagccgtctttattgattatctgaaaaaagcctcggggattgaggatgatgccccgccgccggaagcaccggaactgccagccgacagcggtgaagccgccgccacggcactgaagcgccgtttcagcctgcgccgtctgttcagttacagtctgcgtgaaggactggagttgcgccgtgaccctgtgcgtctgacactggcactgctcggcacagtgatcctgatgtttattatggggtacggcatcagtatggatgtggaaaatctgcgttttgctgtgctcgaccgcgaccagactaccaccagccagaactatgtgcaggatctctccggttcgcgctactttatcgaacagccgccgctgcaaaattatgacgatatggagcgccggatgcgcgccggggaaattgcggtggcgattgaaattccgccggattttgcccgtgatatcgccaaaggccatgatgtgaaactgggtgtctgggtggacggtgcaatgccgaaccgggcagaaacagtgcgcggttatgtgcaggccatgcatctcaactggctgacccgcatggcgtcaaaacagccggtggcaaacccgctgcgctctgccatcgatatcgaaacccgctaccgttataacccggatgtgaaaagcctgcctgctatcgttccggcggtgatcccgctgctgctgatgatgataccggcaatgctcagcgccctgagtgtggtacgggaaaaagaactggggtcgattatcaatctctatgtcacgccggtgaccaaaacagagtttttaatcggcaaacaggtgccttatatcgtgctggggatgtttaactttttcctgctctgcgccctctccgtctgggtattcggggtgccgttcaagggcagtctgctgacggtgacgcttgctgcattctgctatatcaccattgccaccagcatggggctgctgatctcctgctttatgaagagccagattgccgcaattttcggaaccgcgattattaccctgatcccggccacccaattttccggaatgattgacccggtttcatcactggaaggtatgggttactggatagggcacatctacccgaccgctcatttcctgaccattacccggggaaccttctccaaggggctgggacttatcgatctgtatcaggcctttattccgctgctgatcactattccggttgttctcgggtgcagcatctttttcctgaaaaagcaggagggataacatgcggacactgaagaatattatctatctcggcatgaaagagctgcgcagcctgatgcgggataaagcgatgctggcactgatcgtgtttgcattcacggtatcaatctattcctcggcgacagtgacctccggctcgctgcatctggcaccgattgccattgcggaccaggatcgctcccagctcagcgagcgtattatcaacagcttttacgagccctattttctggccccggcggatattgatatcagtcagatggacggcctgatggacagcggcacctacacgtttaccatggatattccgccgaattttcagcgtgatgtgctggccggacgccgccctgccattcagctgaacgtcgatgccacccgcatgagccaggcgtttctcggcaacagttatattcagaatattgttaccggggaggtgaatacttttctggctaaaaaccggcaaaacagtgtgctgccggtggatctggatatccgcgcccgttttaacccgaacctgaatcagatgtggttcgggtcggtgatggcgattatcaacaatatcacgatgctgtcgattgtcctgaccggggcggcactgatccgcgagcgggagcacggcacaattgagcatctgctggtgatgccggtgacgccgtttgagattatgatgtccaaggtctggtcgatgggactggtggtactgctcgcctcgctcggctcgctgctgctgattgtccgctttctgttacaggtgccgatagagggttcaattacgctgtttatgtgcggggtagcgctgagtctgtttgccaccacctccatcggaatttttatggggacgctcgcccgttcgatgccgcagttcgggctgctgatgattatggttctgctgccgctgaatatgttatcaggcgggatgacctcgcgggaaagtatgccgcagtttgtacaggatattatgcagaccatgccgacgacacacttcgtcagtctggcacaggctattctctaccggggcgcggatttcctgatcgtctggccgcagtttatttatctgatcattatcggcggcgcgttttttggtgcggctttgttacgcttccgcaaaaccatcagtgcgatggcatagaggcaagtaacttacaggctgtcagttcagttaataacggataatgcagggatacggatatgattaacattctgctgatgagtgatacggggatttccccgcagatgctggcgcaaaaaatgcgtgatgatgcacaggtacggggtattgatgtcagcattgagtgccgttctgttttcgattaccgcgaatgtgcggctgagtatgatgttgctctgctcgccccgcagtcccgccatcatctgcgcgagtgtcagcaaagtgccgccgctgccggaaaaccgctggcctgcatcgatccggatatgttctgggatctgcaaagcgctgcggtactggatttggcgttgtcgttattgaaaaatccggcttaattactgccggaaagaataaaaccatcttctttcaaacccgggcggcgggataaccggcaaagcggaaagccgctgacacatccctgtccgcttggatcgcgccatccccggcaagaataaaaccatcttctttcatttaacattttgctgctcactaaggagtctgtaaaaaccacgtcacaggagacattttttatggagcaacaactgcggttatggctgcaacaacaatttgaactcagtaatgactacgcctcatgggcggccattaccggagttattgttctgattctggctatcgctgttattctgcatcttaccctgcacaaaggccttctgccgtatattgaacgccgtaccggcggcgctcagcgcccgtggggcgcgttaattacccgcacccggctgtttaaccggtttgcctttctgattcaggggatagtgtttaatatccaggcactgatctggctgggacgcgggtctgccgcacaggagatcctcacgaccggggcacaggcatggtgcctgctgttcggcatgctgctgctgttttccgtgatggacattcttcagaacctctcccgccatacgccgtctctgagccgccttccgctgcgcggcgtgatgcagagcctgaaactgattatcgcggtgctattcagtatcctgattatctcgctgctgataggaaaatccccgctgattttactgagcggactcggtgccatgaccgcggtgctgatgctggtctttaaagacccgatcatgggactggtagccggtattcagttgtcggtaaatgatatgcttaatgtcggggactggctggagatgccgaaatacggcgcggacggtgctgtgacggatatcggactgacgacggtcaaagtgcagaactgggataataccatcaccaccatcccgacttacgccctgatttccgactccttcaaaaactggcagggaatgacggcatccggcggacggcgcatcaaacgcagtatgaacctggataccaccagcatccgttttctgaccgatgaagagatcagccggctgcggcaatcaaacctgatagccgggtatatcgatgccaaattacaggaaatcgcagaatacaatgcgcaggaacccggagataccctgcttaaccagcggcggctgaccaatatcgggacattccgtgcgtatgcggaggcgtacatcaaaaccagtccgcatattcacaagaagatgaccaccatggtgcgccagctggcaccgacaccggacgggctgccggtggaaatctacgccttcaccaatgtgacggcgtggataagttatgagcaaatccagtccgatatttttgatcacctgttcgcgatcctgccgcaattctggctgcgggtgcatcagacaccaacgggctttgatatgcgcggtattgctgcgcatttcgcccgtgaatgtgaatcagaacgccgagccgggctgtaacagaaactccgcctcctccggggtggagtttcgccccagaatctcattgcggtgcgggtagcggccgaagcggtcaatgatcgctttgtgccgccgctcaaaatcctcagtgctttcatcaagccctttaaacaacagttccgcctgctgatggatcagtgcggattccgaatgcatatacggcatcagcacaaacttgcgctgaaccgggggcagttgcagataatccggtgttttcaccgcttcctgcgccagcaccagtgccatcgggtcctgtgcaaatgaccgcgcgtcaccgcgccagaggttacgggaaaactgatccagcacgaggatctccgccagacgtccgccgatgtgcgcccgccagctgaaacattctccggcagttgcctgttcccataccttaagaaaacgtcggcggatcaggtcatcaaactgtgtgtctttcttaaaccattgttccggtgtggcttcattaaaccaaaaatccagaatctgttgtgcttccatcgtcaggctccttttcagtccggccatgaggatctctccctttgcccggcggtcatatcacggtatgctgggaaatcattattagtttaacgcatatattgtcaattatttatcacaggccgatattcatgggaaaactgtccgcacacaccgccacattttacggcgttctggccattctgttctggagcactattgtcggattaatcaaacgggtcagtgaggatttcgggcctgctttcggtgcggcactgatatacaccctgggctcagtaatgttactgctggtgaccggatttccggcaatccgccgctggccgcgccgctatcttatctggggcacactgttattcgtcagttatgagatctgctttattctggcgctcggtttttctcagaaccgtcagcaggcgattgagctgggtatggtgaactacctgtggccttccctgactgtcgggctggcggtgctcatgggcgggcagcgcctgcgcctgccgctgatagccggtctggtgctggcggtgctcggtatcagccgggtgattggcggagagaacgggttatcactcagctctgtcgccgccaatgtcgcacttaatccgctgagttacggcctggcgtttgccggtgcggtgatctgggccttctacagtaatttgtcacgcaggctggcggatggtaataacggcattaccctgttttttatcatcaccgccctgatgctgtgggtggtaaccgcctttgacggcatcacactgcccgcggaattttccgtttcgaccattggttttctgattgccgctgcggcactgtcctgtgccgcgaacgcactctggaccattgcagtactgcgcggtaatgttgccctgataggcacactctcttattttaccccggtactttccaccgcattttccgcattattactcagcactgctctctcctttgcattctggcagggggtgctgatggttaccggtggttccttattatgctggctcgccacccgccggaaataacatgaaaatgaaccggcggatttccggcggaatatgctaaattagcgtcatgctattattgattgcttttcaggaaatacgatgtccaaaaaacttaaacataaactggttaatttatttttgcagctttatacgcgccgccgtgatttttcacactccgtcgctgcctttaaacagctggagactatcgacttccggaatattgttatttattcgacaacggcactcggggattttctgatgaataccccggcaattcatgaagtcagaaaacgttttcctgatgccagaattaccgttgtttccggcaataaaatggcaccttatatccgcaccggtatcggtaaagactgggacgatgtggtgtgctggaacagtaaagtcaataccgtacttaaactggtcagggatttaaaagcgcacggaacgccggatctggttctgattatgcactcacatgatccttatgattatctgagtgcagtcatgaccggggcgccgtttgtttttcgctgtaatcatccgacaaacccgtttatggagcgctggctgacaaactcgacccgctttgcacaccgccattcagtacaggtccgccttgacctgatcacaccgctcggttgccggtttaccgaaaaaagtgttgagatgcgggtaccgtgtgaggtcacaaaagtaccgtcaccggtaagacgggttggttttcagatgggcgcttccagtgaggaacgacgctggccggttgagaattttgtcacactcgcacgcactctgcttacccggtaccgtgacctgaatattgttctggtcggcgcgccgaatgaaattcgcctgtccgatgaatttctcagtttacttgagccggaatttcacaaccggattgagcctctgatcggtaaaaccaccgtcgaagaattaacacaaatcgtaaataaccttgatcttctggtcacaaatgacaccggaaccatgcatctggcatttgcgttaaaagtccccagtgtcagcatgcatgtcagcacctgcccgcaattcaccggcccttatcaggactatgaattgcatgaaattatttccgggtttgcctcaaaattactgctggaagagggagagcatgaaatggcctcaatttctgcggatacagtaattgaagcaaccgttaaatcattatctgtgcggggaatattgccggtatcagaggaataacgctgcggaataatcctgagtaaaagcacggtctcacacccggccgtaaaatacagtagactgacagaaaaaggaggatctatgtcagagaatatgcagaagccgaaaatgacacaggaagaagaggacgaaattgagtccctgacaaaaagccttgtcatgcgggataagatgaaactgccgagaattgacagagaagtcgagcagcagcgccctgaacgtttacgtccctggttccgggaacgtcttaaattccaccgcgatgccgcaagaaacagttaaccgtaaaacagagcctgccggtaacagatataccggcaggctgaaaagggttattttgccatttcaataatttcttttgctgttttaccctgtaatttttctttcagcaatgacatcattttttcttcatcgccaccgctggcaaaagccacctggaagctgattttagtaatagcgcctttcagctcacgggattgctccgggctcagatctttttccatttttgcaatggattcctgcgctgcctgctgagaagacatatccagtgttgcatcaccacaagcggtaagagcaaaagagagcgcgataactgccagtaattttttcattttccacctcgttaataatatctgcggtattttacattgccggacagataaaaccatgtttattacaggcagaattaaccgtttatttatacagttataaccatgtttgccccgccctgtgaaaacaggaaatttatttgttattgtaaatcagctgtttttcagtaccggtgccgatataatacttccgtctgcgaaatacacggaaaaactatgtttaacgaacgcgttgttgatgaaattttaaactggatagaaaacaatcttgagtctgatctttcattagaggccgttgccgggaaagccggatattccaaatggcattttcagcgtattttcaaacaacagaccggctataccctggcaaattatgtccgtgcacggcgtttatcctgtgcggccatcgccctgcgcctgctgccgctcaacctgatgcatttatccatgaaataccgctttgattcacaacagacattctgccgcgccttcaaacagcattttggtattaccccgtcaggataccgtaaaaaaagcggctggcagccgggcggctttgtactgccgaaacgttatgccggaaaactgcactcctctgttgagatgacgacactgccggaaaaagtgctgaccggaacatcgaatgtgtatcaggcggcatcagatccctggaatatgcgcctgccacagctgcgcaaatattactggcaaccttttttacagcggctgaccgctttaccggaggcggtttatgccatacacggtgtcagtaaatctgccggggacactttctcaatgtattatgccaccctggccgaagcacactgcctgaaaaatacgataccgcaggatattgtttatacacccggtcatgcccactacttaaaaattatttttaccggtgatttttcagatattgatttccaggatattacttacgatatttataataatattctgccggaactgaatattatccgccatccggagcatccggatacggaagagtacatatttcaggaaaacatcacggaattaaacccggaaaacccgaaactggccgtccgggtgattaattattacattcctgttatgactgatgcggcaggctggtggttattctccgccagcactatgctgttgcggtcattctgttctgatgcctgttgtgcaagaatatgttgctgtctggtgtcatgaaatccgagaataaaggtaaataatacaaaaccgtataccacttttcgtttcgacggcacccgtttactgattaaaatataaataatcagagccgccaaaataactacccctgacatgtatacgtagttttccataataataactcccctgattatattccaatcgtagtttatcttatctgtccgtacattattctgatagtcgtcttaaaataacaaaattaggaattgactgttatttattctctgttttttacacatgaaccggttactatgaaaaggagtatcttctgatttgcggaggtaaccgatgtcatcatatgcagaacatatcaccacggcgcacattcagtgcgatgcggaagaagcgctgctgccgctgttaaaagaactgaccgataaacagatgctgggcggctggcggttgcgcaagcatgaaacaccgcctgccggggcagtttccccctggtatctgctgaaagataatgcacaaatcgcattgctgccgacacatcctttcgctgctgtttctgttgcggatgccgctattacggacgaagccgaaatcacggcacataatgaccggattgaacatctcagtaatgccatcaactccacttacggtattttatattgccatctgtcgtttaaggcattagcggtatagtaaatatcaggtaatgtaccgggattgttacgtatttcccgattattctgatacagacgattcccgaacaggtctatgttgtaacacgcctattgttcaggagtttatgagatgaaagtgaatattaagagagtaagcacagtgactttatctgcagtcctgctgcttgctgtagccggttgttcaaatatgtcgaaacgtgaccggaatactgctatcggagccggtgtcggtgctgttggtggtgcaatcctgaccgacggcagcgcactcggaaccgtcggcggtgcagcaatcggcggccttatcggacaccaggtaaaaaaataatttccggagccggcatactgccggctctttcattctttcccggctttataccggtaatgcccggtgattttccagctgaacagcacatcctcactgacctgcccgccgccgatattatgcatgaccagcggatttccgctgaacagcgcggttttaccgatcacaataccgatatgcggacgaccattatccagctgccaggtcacaatgtcaccagccacataatccgccgcgttttgtgtgatcggtttggtttcccctttccggctgaaaaaaaccatcagattgggcactctgcggtgatcaatatttgtatccggccgtgtctgtccccacaatttacggcccgggtagagagaaaacgccgttttgatatcttcatgcacctctttttgcagatcgatacctattttccggtaactgcggatcaccacatccgaacatacccctttccggggtgaaacatccccgccgggataagcgattttttcataggnnnnnnnnnnnnnnnnnnnnnnnnnnnnnnnnnnnnnnnnnnnnnnnnnnnnnnnnnnnnnnnnnnnnnnnnnnnnnnnnnnnnnnnnnnacggatcatacaacaccagcctgtcaagctgctgggccgcctgattcagcgatcccgcaccgtaaccggcgggtattatggccacagacaacaaagcagcacatattccggcaatataatgacgcatcatttcctccgtaaccgctcagaaaatcccgtccctgccccagatgtaacgtaataccccggcagcatcccgcggactgagctgtaatatattctgatacagcgctgattttatttcacaggccagtatggcatccttttccagggtttcggcttcctcttcatcaagcaaatcaccataggtatggcgcagccggagaaaaataccggtatataatgcgtcagtttctgcctgagataaacggggcattatttcttttgcgggtaaaaatgtcataacagctccgttatccggctctgcagggtaaatgaagctgaaacaaagcattccggagggatctttatccatcgcgctgttaaacaatgccagccggttttctgcatattgcagtatcatttcatccggcgtttgctgcagcagtacttttcgatcttctgtattactcatataaatcatacggtaaaaattccgcagtttaataccggataaaagataattccgtcctgatatattgctgtgcattgtttctgccgcaaccgcttttggtgacagaaaaaaaataagaagaaaaaacagaaagaaggcagaaaaatacactgtaatacgtaaacggggcattacagtaaacagcagaaaagcccccggcaccggagcggaatgtccggataaaatgccgggcggcatctgcgctgtcatatcagcaggttacccggctcattccagtaccagcttatcctgcccggcccgttcagcccagacattatattctctgaccagcgccatgacttcattattggaatctttcatttcccgcatatgcgcctgaagctttttcaaatcaccgggaaattcccgctgaatttcctgtgtttttatccgcaggcgctgcatttctttatttcgtctttccagcgccgccatcagcatatctctgatttgattacactgcgcaatagcttcaaaatcgaattctgaatacgcccgcatatcgtcgttgtcagtcataaaagcattacccttatctgcaatatactgaacaccgattatagcgttttaccgccgtgattgtccccgtaccttgcggcaggtaaaaatattaccgtctctttatccggcaaaatattttcaccggcagtcagattcactggttacgcatgaggtgattaaactgccatagttcatcgtctaatctcttcatggatatagtcactttccccaatcatacctcccggatagcggataatttgaactctataaggcgagttaccggccatgcctgtgcgggaggacatacagcagagtttttgctgaaaacatgaacatacatctgttatcagtcatatggacttgatgactggttttattgatagagatgaatatatacctatgataaaattttactaatttaaaccatgggaaaatacaatatgccagacgtaatcaaaatcataattgccgggcggaatgttggtggttttggtggtacggaaactgtatttcggtcattctgcagattactggctgaatctgagaaaaattatcagatatcttatattttttttaatgaggaagataatactgttaatgatgaatggctctgtgagagtgaatttatccgactcaactcatcagtcaaaaacagaaagataaaaaggatttctctggcatgtcagttctcgcctttaattaaaaagataaaaccagattacattatagcgtttgattccattggctgttacatttcaagattagctcttcgcttttccttcatgaaaactcctttgttttcatggaatcatttttctgtcgcgggttcatacaaagcgaaatatctgattatggcagacaaacacctgtcaataagtagcggaatatcacatcagttgtcaaagatgggcgtttcttcatctgatatctataccatatataatccggtaccaatacagaacatcacgataactactggtaatcaaaaaaatttcctgtaccttggccgggtaatgagcggaggacaaaaaaatatgaatgaattactccgcgcactatccggagttagtgatgactggactctgcacatcgttggttctggtgaagaatctgaaatagtaatattaaagaatttagctcatgaactaaaaatcagtgaaaaaattatctggcacggatggcagaccaacccgtggaactatgtcgtaaatgaaataaaaaacgtttctgcacttgttttaacatctgtctacgaagggttcccgatggtactatgcgaggcaagcagctatggtatttatattgtcagctcagactgcccgacaggacctggtgatattattcagccatataaaaatggtgagctatatcctatcggagatgaaaaaaagctggcctgcatactacataaaattgtaaccaatgaaacaacagtaaatcccgaaataattaaaaaatcaatttccgcattctatgaaaatgaatacatcaatcggatactggctatttttaaataaagtgttggtaaaccggggttccagccggcccccgggatcgttatctaagtgatataattatttagttctgtaccagcccattaatgtgatataagcgttgacgactgaaattaatgaaccactgcctgtatttcctgttgtaccagaaatggtgtgggtgtgagctccgatagcaacagtgtgattatgattacctgccggacttgtcgctgaatacgatattgaacttttctgatcctgatacggcccccgaattccggatgatattacattattgtaattatgggtgtgttcccctgttgtattcgtcgttttagttccgtaatcaaaacttgacgtagtcccggagaaactatggctgtgtgccggtaaatgggcagcggttaatgtaatattatcactaccgccgctggtcagcacattactgccgctgctgtttgccagccggattgttttattttcaccgatataggaccaggatgttcccggaaataagtcattcgggtttttattttgcgcaaaccaaatgacgacaccgacaggataaatcgtatcgatatttaccgcgtttttcagtgcttccgttacggcattctgactcatgactgatgtggatgaattgccggtattctgcacaactgcggttttatccatctttttattcagatccgcattcagtgcatattcccccgcaggctgataattccctttcggctgataacggccatcaccttctgttttggtataaacatcggtttttaaggcgtaattacccgccggggcataattacctttcggttggaaattagtatcagattccgctttggaataactgtaaccttccggcaaataattccccgcaggctggaatttctgatccgattcccctttgctgtaagcgcccacctctccggcgatcaaatcggctttcagttctgcccaggccgttccggtaaccggttcggtggtgttattttcaacctttgactgccaggttttgtttttatggtacacaacactgcggacagcatacggtttaccggcctcctgccagaccggcactccgaaggactgcatttcgccgactgcttcagtgatatcgtggaacaggctgttcatcttctcacgttcgatatctttggcagccggatctgtggcctggtcccgctcgtagtcatacccgtaaccctgggtataggaaaccgcgccgtcggcccggacttcatcaggaatagcagcgcggtccccttgtgttgcaaaggggactttaaataatttagtcatacgttttatgctccgaagttactgctcaggaagtttttccggttttcaccatgaccaaaggcttttttggtcacaatccggtatttgacgccgacaccggacgggcgcggcataagatcgaagttctccagcagaacgcgcaggcgttcatccggattaaaattaaacacgtaatacagataggtcatatccagcggatcgagcacaaataccctgctgtctttattgccgaagaaccgttcaaggaattcattaatattgctgactgtcgggctttgcgtcagattgaaataacgcatacggataatcagccgtttttgttcctgtgtcagtgacagtgtgtaatcactgttacgccggaaattcgccctgaaattagcctttttattaccaaaaccggtaccgatttttgttttatcatgcggcggaatatccaccccgagcggcacatccaggatccgcgcccagataccgaggccaaaatcagtggcggtatcgatattaaacacatcgttgtaccagttctgccagaagctgacggtcgcccgctcaaaccagtccgatttatggcgggccagcgctttcaggttttccgcctcttcgtactgccataacagtgcccgcagcagatctgaatgaaatgaaaacgactggatggagtctgtcatacaaacaccacctgaaccgcactgcggttaattttggcaacttccgtcagttttaccggataaatatccggtgaccagtgtgtgccgtctgcggataattcaatacggttgataaacaaccgcggctcagcggcattaataccggcagaaatctcaaacggtgaaacttcccgcccgaccaccagcccgccatctcccccggtatcgccgtttgcccaggcttccaccgccgccgggataagcgtttgtgcatccagggcggtttttttgaccgtcacacgacaaaacagcaccacttcttttgcgcgatcgaattttaccgtgtaaacctgcccgctgaccggctccgtcacctcaacctcctcactgccgttataggcggcaccgatggttttggtccgcagcagtgcggcagcaatttcctgactctccccgccctcgacgcagacatacacactgtgcggtacaagcgtgataccgtccgctgccatcggggtattggtataattttcccggtatgccagagagcggacaccttccagttcatacaacgcggaagtcatggcctcaccgacactgaccgtattttttgccagtgtcagtttacggcggcggcgggactgtaaatcagactccgcaatccggccggtaaccgcaccggtcgggttagtcaccgtctcccatccgagaacagaactggccaccgtcatcatctgcccggccggacactccacgggaccggtttcaactgcacgcatatcgccgctgacagtcccgtttttaccgataatcagcgattttgtggtgaaaaacgtgtcaccggccagtgtttctgcctgtgcccctttcggaatgatagtgcccggcacaccgccgaactgtacctgcgtcagaatcgagcgggtggcatcccggcgctcccctcccatcagtgcccagatagcatccagaaacacgccgccggcaagatccgggtttatctgatttgccagttccgcattgttacgcacaatggcatcacgattctctgtttccatcgtgatcaacaccccctgcggggtttccggcgaaacatccagatcctgaccaaacaccgccttaaactcattttcaacggctgtgcgctgctctgcagtatccgggataatcacgccggatgaggtaatataattatattcagccatttaacctgatactcccgtattcagtctgtaaaacagcggtatagctcagattgttatctttcagcgtggccgcgaatgaaatcacttctgtgacctgcgggatctctcctatccgttcacggaatgcggtttcaaacaccggcagatccgcctgccgtccaaacgtggttttccagtacggaatacccttgtcctgcttatgcagcatttcgccgcgcagtgctttgatatactgagcacagctgttttttactgcctgttcatcgcgggcgatggcgagattaccgtctcccccggtgaacagatcattattttcactgacatcaaatgtcatcatagcggttctcctgagtcctcatgtccgcgctgaataccgctgtgtttgtgggttgaaccgatgtctttgccgttatgtttcagggtgccgcctgccgcattactgtcaccattcacagcgtgattaccgttaatggtcacattcccggtataaatggtttccggtgcattaacctcaaacagcggcgtatccaatacggctttatccccgtgcagcgataaacacacagcaccatccgcagactgcaccaccagggcatccgtatttttgccgtcgattacccagcctttgagtgtatcgggaaaaaacatggcatcactgaatgtgtgcagacgtgcggtattgggttcgtcttccagtccgccgcgctggaaaatcaggctgatatcccggtcattggctttcagccagccgaaatcccccggttttaccggcatgcggaaaaaaaacccgccgccgccgaaacgaaacaccggaatattagccagcgcaccgcgcccgactttctttccggcggtcgtcaccatcatcaccagcggtttcaccacagcccggttactggtgtcgtcataactgaccaccgtggccggcagcatgtcgtcaatattcatcagcagactgcggaacgcagccgcaaactgcccggccagactgccgtcactggccatatcactattaggtttattcatggttttgcccgtatcgtcaggcccgtttgcaggttgccgtataaaaaaaggcatcctcatgtgaggcaatatcgaatttcagttgctcgatgatgtaatccccgttcagcgaagggttgaatttactgttcagccgcagcataccgccgaggcaggattcaccgtcgatcagatatgacacttcaagccctttctctgtcgccttcgggatccctatcatgccggttttctgactcagaatacgcagtttgccggacagcgctttatccctgtctttcacatacagcacatcgtcatcaataaaggctttcacattcccggcgtcctgcagccgctcaatctgcttcagcgcgggaccgcaaaaataccagttagcgacatttttatcggtcgcctggaaatccagtgaaacgtggcagtcttttgcgatttttgcagcgatctcactcatttttgacatcgcctgccccccggaagtcacaatatcacgggtaccggcattgccggttttggctttcagcgtcagtgtcacatccggcggtgacgcgatttccgcgctgacaatatcgccggtaaagatacggaatacgccggtactgcgccgcccggcttccaggatgatccggtgcggtgttttgctctccgcaaagggactggtttccgtcagcagcatgttgcgggtttgtgtattcaggccatcaatgctgaatgaacagtcattctgtaacggattggcgtatttcgtgcccgaagcatgcatacgcatgccctcataccattgcagacggccgttaacctcgatggcacagcggatcctgcgtaagtcaatcatcatccccccgccagaccagtgtctgtgtttttccgaactgttcccaccagggcaattcatccccgccggtcagtaacgtaaaattgccgcctgacgtaagatagcggtacgggatcatcggctgatccggcagcatccgcatcccctgcacaacaatctcatcatcgcagcggatatcacagcacatcactccgtgcgcggctttgattgtcagttcccattcctgttcattcagcgtgacccgcaggcgctgattcggcacggtattcagtggtataattttcatttgccccccggtttaccggcagccccgccggcaagtttgacggcaacagaactttttttcgctggtggcggtgctgccgtctgagcctgcactttgccgctgttcaccgtactgctctgttttttcttcgccaccttgcgcggcggtaattcgccgtattccggttcaatcacccgccactcggtaaaggtcagagagaggctgagaccatcagccatttccggattttcatcatgggtaaaagaggtgatcagcatcggcccgtaggctctcaccctggtctgaatacacaccagcttgtgacagtcatacgcctgctgtattgtcttaaactcatcttctgtttcgccggtgagcattaaatccatactgatagtcaccgcattaaccacgacatgatcactgcgggtttcaccggattccacctgaaacgatgtggctttatgggtatcagtaaccgtcagtttcaccgggcttgctgaatcaaacagcgtggcaaatgagttcacatcaaagattttgacttctgttatcatttctccatccccgaattatattcatgtcccatattttcgatgtgctgccgcagcacctcaacgatatccgccgcaatggtctgcggatcaccgtctttggcaacgatacggatctcaccgacagagacattattttcattgctgactgcagactgattactgatcgttccgctggtcagggatgccatcgggttggccgccagcgtggtgacatggccggtgatttgtccggcaagtttcagtgtttcctcttcactgagaggcggggtttccgggatgctgtactccagtttgcccttcgtggtgacggtacggttaacgttctgctcaatctctgccgaatcccccataccgacccagcctttcactgtactccagccctctttaaccagatccatccctttactgatccagccgaggatctcctcaatctgctcccacagccatgtgaagataccgacaaccgcatctgacacggtatcaaagaccgcctcaaattcagcgccccaggccatcaccccctgaatactgactgtcagccagtcaataaactcattgagtgccgtgttcatggtgttgtaagccgcgacgacaatatccgccacaacgccaattaccgacataatgaagtcaaacaggacaacaaacgcctcccacaccgtgagaatgaccgctttcagccccggataactgtcgagtatccgtccgatcatcgagtcgttaccgtcgatgaaattcatgatgtcgtcatacaccagcgcaaaaaccgccgccagcagaaggatccccgccaccaccgccataaccggcagcatggcagtccatgtactgatctgtgccagtttcatagcgtgaacatatttgcctgtcacgacggcggccaccgcgataaaaaagccggtgacaaaatttttgttttctttcgcaaaaacaacgattttttccagccagtccagcccctgagccagcgccgggatcagcatacccatcaggctgtttttcaggagaccggcggattgctccaggctcagcatggcattgttaaaactgatggattgctcaatactttcgcgggtgataccgccatagtctttctgcgtttccatcatccgggataactctttccgtcctttcatcagcagctcaatggtgccgttatcctcaacacccagtccgccgagtgtctttttggcctcaccgaatgacatgccctgcactttatccgccgtctgcagcaccttttccatcgaatccccggcaaaaccgaatgattttgccatagcggataaatcggcctgtgcggcactgcgtgttccgccgagagccgcgaccgagccggaaaacgcatccacatcctgcgtggtgatattgatttctctgcccagcttatcaatggactcaatttcagcggcgcgggctgtcgcatcactgataagtccggtgattgtcgttgaaataccggcgaaattaagggatttttccgccagtgccgcaacgttatcaaatgcactctgccaggcggtatccgaatcacggagagtaccctgtacttttttctgggcacttatttctgccgccgctgccgcctcgccggtgcgccgggtttcggagatgctgttctgcaggtcatcatgattctgcttcagcgccttaaatacagcgtcagattccccgccggtaaactgcaccagcgaggtcacaatggcactcagtttcgtactcatttcaccggtctgctttgtcacttccccggcgttactctcaaactcaatatactgtccgccgcttacctgctcctgccacggccacatctctttcagcaggctgccaaacgtcagcgtgttttgctgcgcctgttttatatcgtcaacgatgtcatccgtggaacgccggagattatcaagtgcgccgtttgtctgactgatatcagattcaattaactgaacaaaggtttccgtcagagacattatctatcctttaaagcggccagcgcttcgttatatctgttggtaatggcgatttcccacagatccagtgcctcctccagatctactgaggttttgagttcgctgagggtggcgagtttttcactgatgatgactgcaaagaagctatcagcgtttttataaccgacgggagtgaactgcctgccctgctgagcagggaggggaggaaaccttggctcccgcctttgccgaaaaaactggtgttgtatttcagcatttccagctcaaggcggatcagtgattccccgtccggcacatggttatcaatcagagcctgtgtcttcagcgggatctcttcaccgctgaccggcacacacacataggccatcattttcagcatggcatctttactgacttcgtagtcaccgattttcggcgcattggacagcggatatttggcgagaatttcccgcccggtgattgccgggagacggctgataatgaatgttttctcaacaccatcagcatcttttaccgccacttctttaggtttgatcagcatattttttcccgtaaaaaaagcgggctttcgcccgctcagaattaacgattacgtgtaaaatcaaaatcctggaatacaaatatgtactgtttggatttcagacggcccacactggagacagagcttccgcggctgccgttggtgatacggccgttacgtgcggtggtggtcgaaccgttgccgtaagaggcaaccatcgtgatgttatccccggcggcgcggcggcctcttttcgccgtattggcgtccagcaggatagccaggttctgatcttcctcactgcccgccggcacgttaattgttaccgtctgcggtgccggagctgaccagctcagcaggttaccattgatatccacgcctgttttcacaatctcagtcggctggaaatccagcggatccgcatcatccgcaaaggcggtgataagaataccggacggaaaggttttgctcgctttcaccaccagcgcgagaccggttgctgatacttcaatcatatttttcttccttacttacactaagttatgtgagccttcgactttacggacccagtcgcctttgccgtaaatcagcacgtatttcatgacatactccggcaaaccgtttttgccggtgttttcggtgattttcgcgtcataccagtaacctttgtcctgcacatcgtgccaggccagatcatcaccagaggcatctgccactgcgattttctgtacttccgtcaggtttttaccggccagaatagtgccgttatccagcgctttggtgactgcaccggcaatcaccatcagcgcctgcgcctcaccgtctttattggcaggaacaccgcgggtggccagcagaaggctgaaccactgctgtgcgatatacgctttcagccactgctcgttggcgtgaacactcatatccagcggatcagatgctccgccgcacaggaaaccgcgctgatagaaacggatttgtgagccggccaccgccgtttcgccgtaatagttcacacgcagcttgtcgaagcgatccgcatcagcgtctttggtcacctgtgccgggaaggtcacacccaactgacggaacatgtagtttgtcgcggcattcgtccggtcataatcggtcgctgccatcactgccatcggcagcgcctggataaagtaaccattgtccgttttcaggttcaggccaacagatgccgttcctgccagcgcggaatttaattcctctgcattgtcggcagtcacactgagatgcagctgatatttcacattctcaccggcgatatactgcgccagtggcacagcctgctctgccggtaattcagtgaggaacgtcgcactgccgaatgagtcagatacctgctctgccaccataaaagcttccagtggtgtctgcgccggatgcccttctgatgacagcccggaagaaagccccatggcatccgcgagaacggaatacgccacaccagcggagacatgctcctgtacaccgccgttcagttcgaacgcattcttttgcgcattaaacgtgagataactgcccgcgaactgcggctcgctctcagcgttcagttttgcctggatcagcgaggcaatatcggcataggatttggctgccgataaatccagatccttatagtttttgatggtctgaccgatggtgacggacagtgtgccgtcggtgacggcagtcagatcagccagcgctgccgctttgacgccgaacagtgccggtgtgcgcccgaccggcgcgtatgcggcaatttgcagcgctttcggtttacttaccggtgccggactgacataactgaaatactgacgggcaaactgagcttccggtgaatccgcccccagcagttcatcaacctgacccggcgcaaactcaaggacatgaccggccggaattttcggatcagcagagaataaccgtgcggtcagcttacgctcaggcacagcagaagcgccgatgaccgcagaagcgatatcgacataacgtgtttgtttaattggcatagtaaaaccttatatgcagtaaatatccgggaacaacgctgaaacaacgccggtctccgggcggagtgtacgggtaaacgtcacattgaaatcaaaagaaggtgcctgtctgtaatgcccctggtcgtcagccagatacggcacccggatagcaccggcgcgctgaacgccgactccctgtttattcagcacaccggtaaagggcagtgaattcacaatcatcctgactgcggccacaatatcaccggcggtatatgtctgagattcagtaataaacccctgaacccggtattttttttcagttatctggctttcggtatgattggcattctgcccgcggacggcataactgcgtttctgccatcccgcaggtgtctcaccaacaggataaaaggcaataaaatcctctccggagatatgattttccggaaagaaacccgccttaactcccgtggtaataccgtgatttttcagctcagtaaccagctggttataaataattaattcaatgtctttatcattcattcttacctcagtgcctgtgaatactctctgcctcctgtccggccataaaaaagccctgctcacaggcagggctgaacacaccgtattccggtgcagtgatataatgacagataaataatgatttaatttccgtcaggaaaccgtatattaatggcatccgccatataccataaaaccggaaccggcatcatggataacgattacaacagtaaatcaacacaggaattggctgatggtttagcgctgtatctgaaacagggttatatcaacccgctatatatcaactgcgactgtgaagatgagggtgcagaagaagcgggtttttatctggatgcgctttctgtacgtgaccctgatttatcctgtgatttccggaaaaaaataatggaatcgccggtaatcagtaatgattattttaaatcccaatgtatggaatatttactgttgtcatcagataaacaccgtgagtatgttattcagtatttatcctgtcattacgatgtattaccggtttctgtgctgcaaaaagcgatgttttatttttattgtgcaaagcgtgatcctgatgacaatgatgttgtcccggattcactaatagtaaaactcaaatcccgctatcatgccgttaaagataataaagacgttatggcttacgaactgactgaactgaaagaaacctgcgacgacttttacgtcgcatatccttcaccgtaagatgcaattcgtcattttttacagattannnnnnnnnnnnnnnnnnnnnnnnnnnnnnnnnnnnnnnnnnnnnnnnnnnnnnnnnnnnnnnnnnnnnnnnnnnnnnnnnnnnnnnnnnnnnnnnnnnnnnnnntaccgtttgcggccgcaccaatgtgctccggactgcggaaaaccaccccgccataatgacaaagaggcactcagaatctgaatgcctttcaatatgtaattcgtcattttttacagattagcacgctgtttgcggccgcaccaatgtgctccggacatcaggacaggctttatataaaatatccatatccagttgcactgccagtgtttccagacaaccaaaaataaaactttccgcgctctgtacctgtttacggatttcatcctcgcggactttatatttacgcccgatcgcccgcttgctcatccctttcacgtaataatccgtaatataatcgcgctcacgttccagaccggccgtacccagcatagatacacaacggtcgataacccggccatcctcatcgctgcatgagggtctctgtttactgctgttctgagcaagttcccggaatccggatgaaacacgggcccaacccatgcccgcacagtgatcacccgctgcccagccgccccagtgcgacagtatcgtctgaatgtctctgctcataatattcacctgtatagtatccgtatttatttcccggtatcagctcctcttcagtgcccgctcaggtcgccgggacactgacaggaaaagcccgcccgggattctaactggataaatatacagtatttttacggatgacgttaatctgctccggaaataacagggagattagccttgtgaatatccggagcaactatcagtgaaacacagaattagtggttatctgacggtgaaataactttcacgccttttatagccgtcacatcgattaataccggtgtatggtgatgcccggtttcggcataaaacatttcgccggtaacagagacctgctgattaagataatgctgatttttgctgtaaaaatcacctcttactatcagctgaaactggtcattactgccccagtccggactgtcttttatacaggtcaaaggtgctttggtaaaaagaacccaatacggctccggttcatcgccctcttccacgctttcataatttggcggccccggaaatacaacacgtttcagcgtaccggttaatgtcacctgctgcccgtcctcgtagcatatctgcgctgatgccggttttttactgtccgcaatattccggaacaacacagatgattttttataccattccagctggcatgcttctgtatcgcaattctgtaatctcagtttccggttttctctgactgtttttttaaactcatcactgtttccggtgattttttttgcctgcagataatctgcatataattcatcatccgcctgagataatgacggactatcgcacacaagtttttctgttttactctgtgctttactgcaatcaaaactgactgcaaaagacgcagatgaaaataacaaacaggatataaccaccacttttttcataccagaccttctgtttcccggtgacagcttacaaagataaaaaccagacatccgcggctgttatcccttaactcttcgttattgtgccacaggagaaatcacatttaacgcaggtcaggtcacagataatctccgtatgatttatttttaaccatggataccttattacggtatccggccggcagcatacaacatatcaatgatcacgcccgggctgaccggcatggcaaacaaaaacaaaaaatcagtgatgatgaaatcatatccgtactctctgtgattatcattccgccactatatcattttacctggtggccggaatccgtaccctcaacagaaaaggctgaaaacatcacataatgaccacctaaaaaaatcaagctgccgattagttttggtaagtaatgatacttatgttaaattgcctgtaccacctcagttcacgggaaagagacagcatgtctgacataaccaagatcatcattgccggtcgtaacatcagcggttttgggggcatggaaaccgtattcagtacattcagcagattactgactgaatccggaaaaaactatcagatatctttcgtcttttttaatgaactgaataatagtgttgacgatacatggctcggtaataacccgtttacacgtttcagttcatcgctaaaaaacgggaagctgaagagagtttattttgcgtgtaaattcgcttctgttattaaaaaaacaaatccggattatgtcattgcctttgattctgttggttgttacatttcaaggctggctttacgcttcgcatttaaaagaattccattgttctcgtggaatcatttttctgtcaccagctcatataaagcaaaatatatcagacttgcggataaacacctgtccatcagtaatggcatagcaactcagttatcaggaatgggtatcaatcctgcggacatttatacgatctacaacccggttccggaacagtttaaaacaatcacctgtggcaatacgataaattttttatatgtcggtcgcttaatgtgcggaggacagaaaaacatgaaggagttattcagcgcattatccggtgttcatggtgactggaaattgcatatcgtcggctccggcgatgactccgaaataaagaaattaactagcctggctcacgatttaaaaataaacgataaaattatctggcatggctggcaatcaagcccgtggaattacatagaaaaagaaataaaaaatgtctctgcacttattttaacatccgcatacgaaggattaccgatggtgctgtgtgaggcaaacagctatggtatttatactgtcagctcagactgtccgacagggcctgctgatattattcgtccatatgtaaatggtgagttatatcctgccggagatgataaaaaacttaccaccattctgaataaaatcgtttccgggaaaacagaaataaaccatactgtgataaaaaactccatttcactgttttatgaagatgaatatcttgcaagggtttcggatatatttaaataataactctacattttccagccacaagctgccgatacaccatcaatagttatttagtattcataaattcacatgacaatatcacaatactatttcactatcactggcactcagcccattgctcagtggttttagttttgaaatctgaaacagcgtattctttataatccactgacatgacataaacagttttatcatcctgctcaaagtaataaccattcttttttgttttcatcttcggactggagattttactgccgtcgggcctgaacgcagtgaatgctgaattgctcaatgataccgtggagtgaaatcggccttgcatagggcccatggcatcaccaacgatcacagccttagaataaatacaattataagcaacaccagaaccgattgaaccgccactgccagaagacctgccagccaatgatgccgcgcttactccgcctgttgctgttgctgccgctgttgagccgtgcagggattttttactattagccgatatggatttattactataattctttgtgctgtaactgtttgctgttcctatcctgcaaactttgtttgctgatatacatgagttgccgcagggaattccttttttgcaatttttagccaaagcatcagacaagaataataagggagataatgccactaaacagacgacagttattttcaaattagccatcacaccactccaataatcagtttccctcatgttaatcgccaggtggtgcaaaggaaagcaaaacggtgtgaacatttgaggtagacggcaaaaagaaaaacccgccatatcaaagatatggcggggtttttatggtgccggctatcggaatcgaactgatgacctactgattacaagtcagtnttttatatggtgccggctatcggaatcgaactgatgacctactgattacaagtcagtagttttgttttttaatcaattagataccgcattaaatcacgctttcacgtcccaacaattaaaaagattgaaaaggtataaagcacatctaaaaccatttgtgtcccaaatatgtcccatcacttctaccaacagctataccccccatcatttaaacaatttgcatatttgcgacaactctttgtctaactggtgccacattaacttttcacctccggtaactgactaaaatttgttgtgtatgccggtgatagcatttcgctcttcatcttatacccgctgccaacacctttccggcaaatatacagagttgtataattactaaatttataaagtatcagataactaagttaccttacttttttactgtactgatagtaatcacttctccatcctctttcacaaattcactctgtaatttactcggtaaaatatccaacactaattcagatggacgacagagctttacacccaatggagtgacaactattggtctgttaatcagaagaggatacttcagcatgaaatagataagctgtgtatctgtgaatcgaccactatcaagttccagttttttgtaaggttcaacatttttacgcagcagatctcttactgtaatcttcatttttacaatgagttttatcaaaacatctctgtctggtggtgtatccaaataatggataatattaggttcaataccgctacttcggatcatagcaagtgtattccgggatgttccgcaatccggattatgataaatcgttatattgctcatgtagtcaccattaattgagatacgaaagccttatgactaaagtgattagagtaatggttaagaccggaacagtcataataatgcctgtttttaagtaatacccccatgtgatagtcatatttctctgagataagacatgaagccataataatgttgcaaggcttccgataggcgtaattttcggacctaaatctgcaccgataacattggcatagaccatggcttcctgaataagaccggttgcattgctaccatcaatcgataatgccccgacaaggacggtcggcatgttattcataacagaagataaaaaagcaatgatatagcctgttcccagtgttgctgcccatattcccttgtcagcgaggtaattaagtatttctgacaggtaatttgtgagcccggcatttctcagaccatagacgacaatatacatacccagcgaaaaaataacaatctgccacggagcaccacgtaacactttccgtgtattaattattttgccatgggacgcaacaagccataaaacagatgcacccactgccgcaatagcactgaccggaatacccagcggttcgagaacaaagaaaccaatgagcagtaaaatcaggacaaaccatcccgccttaaatgttttcagatctttgatagccgatgccggaataaccagctttgacgtatcgtagtattttggaatatccctgcggaaaaaccagtgcagcataaaaagtgttgcaataatagcaacaatatctaccggcaccatgacagaagcatattctgtaaatccgatattaaagaaatcagcagagacaatatttaccaggtttgagactatcagcggcaaactggctgtatcggcgatgaatcctgcggccataacaaacgccaatgttgtccctttactaaatcccagtgccagtaacattgcaataacgataggtgttaatatgagtgctgcaccatcattggcaaataaggcggccacactcgcgcccagcaagataatataactgaataatagtttcccttttccgcccccccattttgctacgtggagtgcagcccattcaaaaaaaccactctcatccagaataaggctgatgataataacggcgacaaaagtccctgtcgcattccagacgatatcccagacaacagggatatcctgaacagtaattactccggataagagtgcagctaacgcacccagggtcgcgctccagcctatactcagccctttgggctgccagataacaaaggtaatggtcagaacaaatattaatgcagcaacaagcatagcaacctctttcagaaggtgcaggaagcaccttctgccaatgataaaactcaatcagccaaccggctcagtgccacgataccaacaggctcgttttcaagcagcggtacgattgctactcgttttgccagcgatgatgtcacttttttgatctgcggaatttcatgctctgctctggaaagtaataacggagatgttgtttcagtgacagaaaggctgttattgatgacccaggcccacggatgaataccagctctcataagatcattctgtaagttttcggcttcaagtaccggggttgtttctgccagggtcgtaatgatgaccttggttctttccggatcctgcagttgcatcataggtgtcaggaaatggcctttttcacccattttttttgcgatttctttgtgataggcaccggtggcatcgagcagaagcagagtatgcccggttggtgctgtatccataataacaaaacgattcccggcttcacggatgatgcgtgagaatgcctggaatacagcaatttcctctgtacacggagaacgcaaatcttcctcaagtaatgcccggccttccgtatccagagattttccttttgtctccagtacatagttgcggtagcgttcggtttctgcaacagggtcaatcctgctgacctgcagattaggcaggctcccgtttaatgtattttccaggtgtgcagccgggtctgaggtagtcagatgaacatcagcgccctgttctgcgagttttactgcaattgacgcggcaattgtggttttaccgacaccgcctttacccatcagcatcaccagtccgtgcttctgcactgcaatctcgtcaacaagagacgatagtggctgcaatgacaggtcaggcttagtattgtgaatagccggcaatgtttgttctttgtcagataataattcctttagtgcctcgatcccgaccatattacggacacgtagcatcaacatgtctgtcggtaggttgcggagtatatccggcatattttgtattgcagtctgttcacggttacggagcgcctgcgataatttgtctccggctgtcatcgctgattccgggaatacaccattaattatcagctgctgattttttacacctaatgctgaaagctcgtcataagtacgggcaacttcacgcaatgcggctgactgagggcgggcaaccagaattaagcgggttaattgtttattgctcagtgcgtcaactgccatgctatattgttcacgttgcttttcaagtccggacatcgggccgaggcaggaagcaccgtccggattatcactgatgaaatcactccaggcacccggtaactgtaacaaccggatagtatggccggtcggagctgtatcaaaaataatgtggtcaaactgatttgtgatttttatatctgtcagtaagccggtaaattcatcaaatgcagcaatttcggttgtacaggcaccggatagttgctcggtgatactctgaattacggctgccggtaaactgtcttttatcgggtctatgatttttttccggtattcttccgcagcggcttgggggtctatctcgatagcggacagattaggtacggcggaaatctgtgtaatcgtattgccgatagtttgtgaaaatacctgtccgacattggacgccggatcggtactgaccaaaagaacttttttttcgctctctgccaatttaatcgcagttgcgcatgaaattgatgttttacccacaccacctttaccagtaaaaaataagtaatcgggcacgttatccagaaatttcatttttgtctcctcaacagcatgtcttattgtttccgcagcaaccggctgacaggactgatttttcatcagaaatgcgaataccaaaccaacgggctaactcatgccgtttcgggtaacgtcctgtcagaacaacctcgccatcaagaagcagtaatggcagtgcatctgcgccggcagtttcgagaaatactttagcttttgcgttatttacaaattccatcggctcttgtcccagattaaaacggcggacattggcaccctgttttttcagccaatcaaaatcagtggcaaaatccactaacgcctgatcgacatctgttccgcagacgccggtactgcaacataaggcaggatcaaacacttccagcttcttcatatttacacctcatatatgattaatcgaatatattaatttaaaaaattttatgcctgacagttacctgctgtatttttgttgtttatggcagcgagtaactgtgaaactctgtttttctcggtggaatatgtcacctcgatgatatttttaatccatggtaacaatgccggagataacctgtaatgaacccatttcccgtgtttagagtccagaagtagtccagactctctgagcattgcgagatgtcttgatgtttttggctgtgacaaatttagtgctgtgtaaatatcacaaacacacaattcaccagatgctttaagcagtaatatgatattcaatcgtgtttggtcgcttaatattttaaacagttgtaaggattccatatctgctcctgtatagttattgaggcttaatctactcctgttacacatatgcgtcaaatcgaatatattatttatcgtaataaataaggaataaccaccaataccctgaccaccaactttaaaaaagccaaggatgaagcaagtatcgacttggaagaggatacgccagctacattctatgaaatgcagtcattatctgagcgcttatacaagaaacagggaataagaccaaaaatctgccgggtcataaaaaccagaagcaaatggataaatatcatgatgaccgtggaaaaataggataaaggtgttgatctgatattttattgacccatagttaaatttgtgtatcggccttccaggctgtgtgccaactgccgacatattttgtattctttgtgaactggtttatagaaagcagatcaatgtatctgttcaatgcaaagaaaaaatcccggtatctccggaaagaaatgccgggagtctgttgttacctggctatgagcgcaaacacaccccaaccaaagtattcccgcccgtacgtcacatggcgtttcggcgagatatttaactcagccctgacctcagcagcaaagtcgtcatcaggattggcttccagccagcggcgcatggtcagccatttcgcggcttcatacctgtcccagccatcctggtccgccagcaccatttccaccacgtcgtagccgaggtcgtcgaacgcactgataagttcaggcaacatcaggagatcagctattgcgctgacgccgcatgcctgagctatctcttctgttgagggtagctgacgccagaagggttctccgataagcatgatcccgcccggcttaaggctctgcgccagcaactccaccatcccggcaaatccaccggcaatccatgtcgcacctacgcaggcggccacatcgaatttatcttctgccacatacccagcggcatcgttatgtatgaactgaacccgatcgctgacaccgagctcttcagcgcgcagtctggcctgcgcgctgaacaactgactcatatcgataccgagcccagtaatggagtactcccgggcccaggtacaaagcatttcacccgagccgctgcccaggtcaagaatgtgtgtattcggcttcatgcgtaacacacgacccagcgtggcgtacttctcttccgtgaacgggttgtggatgcggtgttcgctttcactgatggtaaaaatacgtgggatatccaatactgaattccttttattgctttgagtattaagagaaagttcctctgaggtttttgctttttcagccagcagagcaaacaacttcccttcaaatgtctcgctgactggccagttgtgactttcaggaggaggaagcagggtaaatccggcattgttgagcaagctagcgtactcttcatcgcgccaggccgtcatttggctgccgaaacgcgaggtgtgaccatttacctctatggtccagaactgcgttgagctgatctgcgttttttcatcccagccatgttccgtcagtagtagatgagggacacccagaaaaagcccgtccggacagcgttgccagctcacttcagccattccctgacgcttaacttcttcgaaagtatggacttcagtgagcagcctgccccccggatccagccacagcgcgcagtggttgacgagcaagcgcgcatcctccgagctgaacacattcagttccccgaacgtcatcatgatgaaatcgaacgacctatccggccagtatgcacggatatcctgctgaatatagtcgatgtttaaaccagcattctgcgcctgctgacaggcccagttcacggatgccggtgagaaatccacgccagtgcagtgaaatccacgctccgctaagcggtgggtataaaagccgggaccgcaaccgagatcgagtatgtgtgccccaggggataactggctggcgatccactctacctgttgctcaatgatgctctgcctgcggctggcccagtcgtggtcctgcgataaatggttcgacagcatgcgctggctgaaggccggttcgtcccaggggattttgctttcctccgccgacagttgaatgtgtcgggatgaggaaataagggtgctgatatccatcatgctctccttagcggttatcaagctgcgcacgaacgttattcagcccggtggtgttgatgcggtacggctgaccgttgacggacttgataagttttttggttttgagttttttgaaggtggcaagggtacagtcggtgagcaacagcccttcacgggtgtaacattcaacagcggtgaggcgaccagacgcatcgcggacttgcgcaatacaaccacctttggcgagaacgtgtaaggtacgttgttcctgacgggataaattcatactggaaaacctgtttaatcatcatgtgcaaaacttgcaaacacacagtggtgtccacattcgatttcggcgcattgataatcagttcgacctaaaaaggtcggtaagctgattatcggatgattacattctccagcatcaaagcctcgggttagttgaaaggtatttacggaataaatgttaacacacaatttaaatatgggtatgtatcatacgataaagtgtgatttgtttcataaaactaccttttttaactttggccttctccccattgattcacacagtggtgatgaccttgccaaaaaaccggggcttatacagcaacaggtatcgcgctatgagtctgaaaaacatcaatgaccatagacactgttgtgatgattgctcacgcacttaatgtttctttaaacggattctatctgattactttaccttccctgaatatgataactgtgcaattttgttaaattattacaacgtacgcaaatatccgcgccggatatccatcagcgcgactttgttttattcctctgaatcttcggcctgctccgcaacctcctgtgcttcacgctctgcctgctcacgctccatctgttcagccagttcacgttgctt

SEQ ID NO: 46 - DNA, 19062 bp, unknown
  Altogen 322075 strain
cggatgattcagcagatttcgcgaacaaggatgtgtcagcgtctttccgctttgccggttatcccgctgcccgggtttgaaagaagatggttttattttttccggggatggcgcgaaccgaatctgcgtcatcctccgtcccgtggcagaattggttttttaagtaagtctttcccggagtcaggatgtggaaaaaaataatggtgatttgttgcatgatggctgtatctcccctgatggcgcggccttcacaagagatcactccgctcactgaagcggcagagcaacagttcacggtaacgcatcatgagatgcagcagggtgatcgtcactaccgcctctttatcgcgcagccgaaacagccgcaggcggcgtacactgtgctctatatgctcgacggtaacggtcagtttccgatgatgattaaccggctcagtgccggaaaaaaacagccgctgccgctggtggtgggaataggttatctctctgaccaggcttacccgaaaacccgtacctttgattacacaccgcctgcaaccggtgaacagtttgctgcaggcggtggcgaactgcctttccggcagtttatccgtgaacaggttattccgtgggtgagcagtcactattctgtcaacgaccgccgctacttcttcggccacagcctcggcggattgtttgtgctgcggacagccacggatgagcccggtttatttaccgattacatcagtgccagcccgtccctgtggtggggtaatggcacttatatgacagcggaacgatttgatcgcctcccggccgatatccggctgaccatcactcagggcggactggaagaaaaaccggatctgaataaaatgagtgaggagcagaaacacaatctgtccgtccgttacagtgacattactgcgcgggaagtttgtgagcagttacaactgcggggcaaacagtgtcagttccggatcttccccggaaagtcccacggcagtgttatccccgatgcgctggaaacggtgatttccttattaccggcagataaggaaaaataagttatttttttgttaatctgcatgtgaaaataccgcaaataacaggggaaaccccatattcctctgttatttcctttcataacaaaaactactcgcagccattagtttttttgatttcatttttccctcacaaggggctatattccgctccgtttcagacataaattcacaatccactgcttctatcaatgacccgtcatcaaccattttggcgatgaaacagcctgagaaaaaaagcagcgtcatgtttttttgatttttttgttttaggtggagaaaagcagtgagtcacagcatccgcacgccgcgtcctgacagtgtgttaatccctgtcgccggtctgacgttatttgcgattgcatccggttacctgatgagcctgatcccgttatcgctggggcattttgccatcggtaccgactatgcaggctggttagccagtgcttactatattggtttattactcggttcgatgctgattgagccggtgattgcccgtatcggtcaccgccgttcctttattctctttgtgctggcgctggcggcaaccgtggcggttctgccgttttataccgatctcagcgcgtggctggcttcccggatgctggccggggtggcggttgccggtatttttgtggtgattgaatcctggctgctgattggcgataacccggctgtccgcgccaaacgcctgagcttctacatgaccgcactgtacggcggcaccacactgggccagttggcgatcggcgtgttcggaaccgcaggtgtcgtgccgtttgcggtggtgatggtactgttatttgctgctgtgctgccgccgctgttctccaaagcacaaccggtgtgtcacggcgggcataaaagcttatccctgaaacagatcctgcgtctgagcaaaccggcgatggtcggctgtatgacttccggtattgtgatgggcaccatttacgggctgatgccgctggcattgcaggaaaaacattacagcactgaacaggttggcggcctgatggcggccattatcctcggcgggatgattatccagccggtgatcagcaaattatcttcacgcatgagcaaagtattattgctggcgatggtctctctcgccggggtatttgctatgggaatgatttatctctctggtcactatctggtgatggtggtggcgctgacactgctggggatgtcttcttttgctctgtatccggtggcaatcacactggcgtgtgacacactcaccgcgaatgtgattgtggcggcaacacaggtgatgctgttctgctacagcgtgggttcggcagcgggcccgttggtggccggacagtttatgaaacagccggacggtattatgagcttcttctttattgtgctgctctctaccgcgatttatatgctgctttctgcggtgcgccgtaaatcccggattctggcaagctgatacctccggaacgaaaaatgccctcaatgagggcatttttgtacatcgctatttattctgcggattttggtttgtggacaatatccgcataatgacttttatcatccggtttcgggtagacgcggtaaatatattcatccggcgtcactttgatattttcgaccacgcgggtgaacaacacttcccctttatcattcttaccggtcagcgtccgggttttaccgtccgcgctgaaggaccagtcgccctgtaatttcagctttccttccggggtgtacatcttaacggaaccgtctttttcatagttggccagaccaaagaagcccgccacactttcatcggtagccggaatggctttaccgtcctgatccagtgcttctgtcgttacccaggttttgccaaccagataatcagcggtatttgcggctttctgtgccgtggctgtcaggggttttacctgagcatccgctgtggccgccagcgctgaaaaggaatatgccgctgcgatgataccggcaatcattgttgtttttttcatgtcagttcctcaggttgttctgtttgctgtcttttttagtgataacaattcccgatatcaataatacggagattaatcttgtcagctcattttttatgtaaggaagtataaagctgattaaattttatcgtcatttctgacacatctttcgtcatgcaaaaaggttgaaatgtggagaaaaaatgaagaactgtgcagaaattatgatgaattgtgcagggattatggtttcatagtcagaaagggtaaaacggattgtcttacacaccggtatcggcaatgatggcgtcaacagcaaaacagtgcttcagaaaattaattaagaaggaatgttaatatgaaaaaaatcattgcaggtgttatcggtctgagtttattaggtgcgggtatgaccgcgttcgcagcaccggctccggttaatcagccgcagcagaatggtcagtatatgaatggctacggtaactgcgacggtaacggcggtcgtcatatgatgcgcggcaaccatgacgggcgtggctatcataataaccgcggataccataatggtggttacaaccgtgcaccggtctttcagtcagcactgaccactgccaccccgggtgaagccctgaaaaaaatgagcgctgatgccccggcagtcagtaaagacggcaaacagtattttgtccgcgccagcgtccgtgatatgaacggcaacacgctgtatcagtcttcattatccactgcaacgccgaaagaagcactggcgaaaatggcgggtgatgcaccggctgccgcatccggccagcagtattatgtccgcgcaggcattatggaaattctgccggttaataacgccgcacagtaatcgctgtcatgaacaaacaaaaatgccctctgatgagggcgtttttgcttcacggataaaaaaccacagctgtcagagtgtcagtgcagtttccagagccagctcaatcatattgtgcattgcgttctggcgctgatcgatggtcagtttaccgccgtttttaatatgatcagaagtggtgaggatcgccagtgcccgtgcgcccagctccgccgcgacggtatacagcccggcgacttccatatccaccccgagaatgccgtactgctccatcacagcaaacagttccgggcgggtggtgtaaaacaagtccgcagtaaatacattaccggttttgaccggtaactgcagacgctcagcggttttcaccgcagatgccagcaggtgccagtccgccagtgctgccaggtcgttaccgtaaaaacggtcacggttcactttggaatcggtacttgcgcccatggcgatcaccacatccatcagtgacacatcatcccgcactgcgccgcaggtgccgatacggatgagatttttcacaccaaaatcctgaatcaactcatacgcatacattgaaattgaggggatacccatgccgtgagccatcaccgaaatccgtttgcctttgtattctccggtataacccagcatattgcggacactgtttacttcccgcgcctgcgataaataatgttcagcaataaacttggcgcgcaggggatctccgggcataatgatggtttctgcgaaatcgtttgcgcttgcctgaattgcaactgccataaaagcactctcctctcaatcaaaccgtgtgaagggtcggtatttgttggtcagcatgttaacacggtttggtttttataccgccgctgacggcggatttttcactcaggttttttaccggattacacatatgaatacagcaatcggcattctcgggatcgtggtactgctgggaataggttatttactgtctgaaaaccgccgcgcgattaatctgcgcacggtggtactggcttttactattgaactggcactgggcggattaattctctattccccggccgggcagcacgttttatttgtgatggcagaggcggtcaccacggtgatcaacttcaataatgccgggacctcttttattttcggcggtctggtctctgacaaaatgtttgagatcttcggcagcggcgggtttgttattgcgctgcgggtattgccgattattgtctttttctccgccttgtcagcggtactttattatctggggattatgcagatcctcgtgcgctgggtcggcggggcattacagcgtctgctgaaaaccagccgtgcggaatcgatgaactctgcggctaatattttcctcggtgtgacagaagcccccctgctggttaaaccgtatctcggcagtatgacccgttctgaactgtttgccgtgctgtgcggcgggctggcatctatcgccggtactatgctggtaagctatgcttcgctgggggtgaaaatggaatacctgctggcagcttcctttatggcggcaccgggcgggttactgtttgccaaactgatgatcccggaaacacagcagacggccgatgagtccaatgccaaaccggtgcaggaaaaccgcccggcgaatgttattgacgccgcggcagaaggggcgattaacggcctgaatatggccctggcggtcggtgcaatgctgctggcgtttgtcagcctggtggcgctgttaaacggattgctcggcggtgtcggcggctggttcggcctgccggatctgagcatggaactgatcctcggctatctgctgtcaccgctggcgtggctgatgggtattccgtggaatgaagcgctgacatccggtgccattatcgggcagaaaattgttatcaacgaattttttgcctatgccaatctggcggaatacctgaagggtaatgaagtcgtggcggccaccggtctgccgatgactgagcggacacaaatcatcctctcatttgctctgtgcggatttgccaacttcggtactgtggcaattgctatcggcggtatcggcagtctgatcccgaaccggcgcaaagagattgccaccctcgggatgaaagcactggtcgcaggggtattatccaacctgatggcggccacgattgccgggttgtttatcggcggataaagagtttgttatctgattttctgaaacaacctgaatgtcaggttcatgataacgggcaggcgaacgaaaagcatgcgagccatggatggcgagcctgagcgtacagggaggtatttacagcgactttttgttttgcccgttatcatcagaaccggaagggcggcgccgggcttaacaccgcgccgtcctgtctgacaggggattacttataatccccctgcagataacggtaaaaagagggattcacccacactttttcgctcgttacctgcatcccgcttttcgctttgcggatattttccgcctgtttttccgcattctccggcagtgccatcaaatccgcctgataatgaccaccggtcacacgggtttcggccaccacatcataaccgtccaccggcacataactgcggtaaaacggctgccaccaggcggcgcggatcagtcctttctggtcagctgtatttttcttggcgtactggtcaatcaggttctggaaacggttacgttcttcagctgacgaaaattccaggtcgagattatattcactggcgatcgccacttttttgccgcttttcagcgtggtaaccggataatccgcctcaccccattcatccagatagagaaatgcggatgatttcggcgtcagctggactttcggatcaaatccttcgcggcgcagcaggtaaaccagctgcgcggcgtgatcgatatcattatggccgtagcggatcatccgtgctttatcaaagccggattcttcacgggtatccaccaggttatagccgctggtatagcctttatcaataaagttattcagggttttcagcgtcttcgtgtcattcgggaatactgcagttttccaggcggtatgcaggcgcggcacaatatttttatccgacacattgccgagatagcgggtgtgatcctgctgttgtgcatcaacaaaagcctgaagcttatcactctctgccgccggattgttcaggtcatccgccgtcagggcaccgatggtgatcatcagtgcatcgaaccggtttgcttccggctgctgtgtcagcgcggaaatctgtgccgggctgtaggtctccgccagttcggtcagagagagcttttcggcggcctgttgtgaggtcagcgccagagcagggtgtaaaccactgaaaaagaatgcagataacaacgtaccgataaataacgatttttgcatgttttatcctgtaaatgcagcgaacaaacgattgcatcaccatatcacagagttgcaatctgagtgataaagtgtcgtgatttttttacaccggacagagatgaaaaaatgcgagttaacccttgcaggacggagcggggtgagtaagatacgcggtacgtgatagtcatcacggttttggagagattatgaaagcgctttaccgtaagtttataaaaaaaattgatcagttttccgctcttatcccgatgcgttttttctgatccggcgttcccgtctctccctgcgcgtcatatgaacggcgcgctgcacctgaataagcaaccgcagagcttcccggcgggtaaacagcggatgttgccagtgtaacagggtgaaatacatgatttgcctcccggcagatcagagagaaccgctgcacaagcggccggagcatgaattgcctccggccgtctgtaaccgcttatttaaatgccggcagccagccgaacacatccagaatgaccgtcagatacacaatcgcaccgcagacaatcaccagattcagtaccgcgctgttacacggtgaacggtaaatggtatcgctgtcgctgtagcgtttgcgggaggcttttaccaggaacggcggtaaaatcacactccagatagtaaaggccagaccggcataaccgatggcataaacgaatccgttcgggaagaagaaacacaccaccgccggtggcagatacgtcactaccgctgttttgaaacgaccggcgctgtcatttttaaagttcagcaggtcggcaatatagtcaaacagaccgagtgttgctgccagcagggaactggccaccgcaaagttaccgaagaatgtcaggataagatccatggttttccctgacatcactccgccgatagcctcaacgaacacatcaatgttcccgcctttggcaataatcggggagaagttggcgcggctgatattgcccatcgtgacacccagccagaagatatacagcagtaccgcaaatattgtcccgataataattgagcgggtaataaagcggaatttggttttgccgtacaacttcaccaggctcggcacgttaccgtggaagccgaacgaaataatacagaacggcagtgtcatcagaacataaggcagatatttcgttccgggtattgccactgatgcggaatccagcagattggcaatctccacgtgtgcaaccagtccggagaaggtggcaaagaacgcgataaacttaccgaaaattaaaatggtggtaatacgtccgacccataatgagctgtaccagacaatcgcagccaccagacaggcgacaatcacgactgcggcttttatcggcagggcgacaccggtatatttcaatatcgtctgagtcagaacagcggatgacccggagatataggcatacgtcagaatatagagtacaaacccgaaggcaatacccacgacaatattccattttttgcccagtaactcggtggtgaaggtattaaagctggcgcccggttcaaaatgcaggttaacttcaactaacatcagaccggtcagtaacatcataattgcaactaaaatcaaaataacagcggcaccggaaaaccagacaccggccatcgcaatcggcaaagaaaacataccgccgccaacgactgttgctataacaagcatggttccgctggtcagtccgggtgatttatttgtatcggcactatgaatactcataataaaagtttcctattaatgataaatatcaccaacagcattcatatttatcgattttatttgttctttattgttatagggatgcagagacaaaaaggccccattaaaataatgaggcctctgtcatcagataattacacgtaatcaaagcgtgcagtgaagaaacgtaactgcttcggctcgtatacgaacttcagccctttaatgtcttctttgtgtttgaacagtttgataataccgtcagcaaccagatccatgtgtgcataggtgtatacacgacgaggaatagtcagacgaacggtttccagcttcggacggtgatggtcgccggtttctttgttacggcctgcggagataataccgcgctccatagaacgtacaccggtttccatgtagatgctggctgccaggctctgtgccgggaactcgtcctgggtcagatgcgggcagaaacggcgtgcatcgaggaatactgcgtggccgccgaccggctcaacaatcggtacaccggctgctttcagtttttcgcccaggtaacgaacctgcttgacgcggtgctcgatatattcgaactgcatcgcttcgcgtaaaccgatagccatcgcttccatatcacgaccggccagaccgccgtaagaaggcatcccttcataaaccacaaccagttcacgtgcagcagagaacatctcgtcgtcgttcatacacaggaaaccaccgatgttcaccagacagtctttcttaccactcatggtacaaccgtcagcgtagctgaacatttcgtgaacgatgtctttaatggagacatcttcgaagccttcttcctgctctttgatgaagtaggcgttttccacacagcgggtcgcatcgtagaacactttgatgccgtgcttatcacataactggcggacttcacgcatgtttgccatagagaccggctgaccacctgccaggtttacggttaccgccagacagatgtaagcgatattttccgcgcctttctcagcaatcagtttttccagttttttaatgtcgatattgcctttgaatttcacatccaggcccgcatcgtgagcttcatcgcggacgatatcgatgaatgtcgcaccatttttttcctggtgataacgggtggtggtgaagtacatgttaccagcaacatactgacccggtttgatagctaatgaagagagtaagttctctgcgccgcggccctggtgagtaggaacgatgtgtttaaagccgaataattcctgaacagttctttccagatggaagaagttttcgctgcccgcgtatgcttcgtcacccatcatcatgccggcccattgtttatcggacatggcgttggtgccgctatcggtcagtaaatcgacataaacgtctttggaattcaacaagaaagtgttgtacccggcctctttcattcttttgatacgctcttcgcgagggatcatggatacggtttcaacacttttaatacgatacggttctgctggatacatcatggtaaaatctccaattatttataataataactcgataatttacacaggcatttatctgtttataaatgtcatgccttgtgaatgatatagcatttgtaaatccggtagtgttcttgtcttaattcaaattcagtttttttatttctgttatttctttctctgccatccttctcgtttggcgtgaaatcatcatgcgtgaaaaaaaatgaaaagggaatggggggtgttgaaataaacaatattcgtattaaccacaggtgtaaaccgggtgatctgtatcacttaaactaaaataatttagcatattcaataagttgaatttgttaatatcttgttgtgtatttatgttaaatatacataactctctttcttaaattccgaggttaatatgaataactcaatgctgtcgggcagttatgccgcaatgaaaaaccattttattctgtgatattttatataggttaagaaaacgtaaataaggataaaacgtacaaatttaaatctatctttacaggaagaataaaaaaacggatgagaagtcttgttcttttttaacaaaaactatgcatcagatgcactgtcatggaaatttaatttaaaatatcttataagtaactattgttataatcatctttgtttttattgatcgtacggaaaaacgttatgatttattgaatccttcaactgaaaccagggataaaaataaaaatgtgacacagtcaggataaatttgatgataaagatcacattgataatgttacgttacatgaatgaaaagtaagcgacagcagggaataacaaagatatttaattaaagcagtgaattgttatgcattccgatatgtggttgtttagtgatcatattcacggtttcgcatttacagtcatgttagtaaagcaaaatgctgtacttaaatgtttacattatcagcgggggaatagtaacaggatgtgtgtgatgtacatatttccccagggtcttgctattgagatttaacgctattatttacgattaaattggtatttaaatccataatatatattgatatcagttaataattaacatcaagttcttgttatcaggttatttatctttgatggtatccggagtgatttacagagacagacacgatttcatgaagaatcggcaaccgcccgctgaaaacggaaaataacgaatttgtgcttcagatcacgcaaggaaggtatgaataaagaagaaaaatcaggcaaagcggcagagatttccggatttcagcttgaaaaccctgccgggcaggagtgtaataatgctgtgccggattagctcagttggcagagcagttcattcgtaatgaaaaggtcaccagttcgaatccggtatccggcaccagtaaatcaataagttacgcgataaataaatcagactacatttttgcgtgccatattcgtgccatgagcgttaaaaatgtcatcgatatttttcgcgtgctcctgcaagtgagcgggtgataagtgagcatatctgcgtaccatttctatgctttcccatccgcccatttcctgaagcgctgacaatggaacaccggcctgaattaaccaactcgcccaggtgtgccgcaagtcgtggaaccggaacccctcaattcccgctctgcgcattgcgcttttgaaagccttgtttgcgtcggcacgcatagggactaactctgtagtgccgtgcagctttctttccctgacgaaaacgaactgctcatgccggccaatttgctcgcgtattacctggcaggcggtgtcgttcagagaaacacctatggcgcggaagtttttggactgatccggatttatccatgcaacctttcttaccaggtcaacctgtgaccattccagccccatgatatttgacttcctcagcccggtggctacagcgaatgtaattaccggcttcaggtagtcggccgcatgattgataagtgcgttaacctgctcacgcgtcatccattttatacgcggttgccgcggcggagtggcttttatatacggggcatgtttcagccatccccattcattagccgccattctcagcattgccctgataaacgccagatacgcatacttcgatgcctgtgacggataaccgccgccgggcttctgtttcttcatccgtgatatgatattctggcattcattattggttatcgtacttattggccgtcccttgaaatattgcagccaaaatctgatccggcctttgtctgcgttaatcgttcttttactctgcttctcttttagccaccgtaagcacgcttcctcaaagcgatactccggctcctctccaaggcggtctattttccagtagtccgcctttaatttatcgtgcaattcttctgctaattcgcggtctgacgtgccaaggctttttctaactctcgttccgcctgacgaaacgaaatcacagtgccacacgccgtaccgtagtttgattgacatgattttaatctctccttcgatttgtcacgacaatcagtattcaccaggttattttcatgaatgctgatcgcataagcaagacaatccgacttcagcatgcgataccggccgtaaataactcttccgttttcgcctctggtctttctctggctggcagtgagttcgccagttctgattaaccggcgcacttcacgttcagagcatttcaataactgagacgcttcttttgtagtcagaacctcatcattaagatccatccttcatctccttctgtaacgtacgcacgtaatacccgagcactctctttgccggaaagcgcaggtgattaagtggtttaaatttcggtgtgtatttgtcgagtattgcggtgtgttgttcgtctgatgtgtactgtattaattccttcaggcattcccttgtactcgtctgcgtccgttctctgcttcctgtggtgtcataacttaacgcttccgtccacctgatccccgtacacatcccattcgccgtatttctccctggcaaacagttcaatgcgctggacatcgccatataactcttccagccggtgatgcacttccttcggtttctcgctgtgctcaccgagacatgaatacactatctgcctgacgctggccgactggcgttcaagtccccggcctctggtagcaatcaggcatgcctccgcattggcgcgggtatagttgccgccattgatccgtgtctctgcgttcagcaattccatgaaatcaaagaagtcctccggtggatgtctgtctatccgatccccagcgtttttgttcagcttcacccatacgaacccgaagccggtacgcaccttaaatccccacgcctcagccaattcgtaagcctcacggacaaagttacccgtgtaccacatgcagagtacggagttgtcagaggctattttttcgatgggtaagcgggtgagggaataaaaatcggtggtgttgtagtggttatctgctgcgccatttgaggatttgttgctatatgaccaagggggatcggctaacagaaggtcatattttttcattctcctcgtccttcatgatcagaaagcaaatcatagctgcgcgataataatttttatcgtaaatttccagctcgcctttttcttcatcaaaatgatatgcgcaccagccaacatccttatcgatataattcatgcatataccattctcaataacaatcggcattgcgtccgccgggttgttgcaggggtcgaatgctccgattttgaattttgctttgataattacggcatttttatgaaagtaaccggtagactttttaaagccgtcatcatgaaagggtttagctcctcgtgcaacagccacagccttattaatctcaaagtctgatttgtcacgatatttgttcattgattaactccagttcttcaggttgataataatcaacaaaaccttcttcgttttctatgcagatagaaatttcatcaatttctataatcacgcattgttcattaggcgcaatccagcttgaatcatctactgtcggatacaccttatcgccgactttaaatttattccccacgaaccacctccgcacacactaattcaacattccgcacagccgtcatctgcactgcgcggctctcacattcttcgagcgtataaatatcatcggtaacaggcacagcagagccgtgcattaccagtagtaatacaaatccgattgtcatggttagctctgaattttaggtataaaaaaccctgctggtgcagggtgtatattacttaagaatgttttttgcctttctttttgctctttcgattacctttccataataaaatgataatatcaaaaaaaatacaattgaaattatgcatatgtattcattaaaatatgcaattagaaacgtcattccaatggctggggatataaatgaagctagtttaataaaagcaaaaaatctatattgtaatgttattagaatttcagttttatcaacctcatcgttagatgatataaataactgaaatagtgaaaatgaatttattgaaagtgaaaccgcaaagaaaagcatggatattaatatttctatatatgataccaagctaattgatgtcgtattaacgctaagtagccctataaaaaaagtagcagaaattaatgaaagagatgctgatgatataaaatgaaaattatactttttatttctatacgattcatctgatagcatatctatatcagacctagagtaagaagtgtgtgagaatagtttgcgataaaatctttttttttttttttttcataatccaattaatatttttagttagcgtatacagtactttacttctttatacatctaaactcaatcacccatacccacggattattattccacccgtcggcaccataaatatcaatccatgcctcagcaaaattgtcgtatggtgtaaattgctcgccgccgctatctgggtcgctatacgttggaatccatccagtaagctcaaacccttctgccctggcatcttcctgcgatatctcctgcacccgctgcaaccagacatcgacaatctcaatttcacctttgatattgccgtctttgtctgcgaactgtatttttttatcaaccagaccatacggaaagtttcgctctaaactgtgacccggtgcgacagtaacgcgcttgatacccttgctccagcccgcgccaaagacctcatagaagtttccgttcaataccggctgaggcttcatcagtcgccgcgtctgcgtcttcctgccatcaataacagcagctaacatttcgtcgctgaatttgattctgtctttcatattcattcctctgttatcagcatataagcccttatgaattcttccgcgaccggcgcgacgatggcatttccgtaggcgcggagttttcccacccgactggcagtatcatcagttctctcgccaaagtcaggtggcagcattcgagattttttatctgcccccgtgacggcctgccatccatcccaaacatgtgcagccacagctggcggtacagtgtgtcgttccgcatcttcccgtccttccggaaaaatgactgactcacatccccgcattccttccattccctggttgttggcgttgcccacccagaacaatcgctgtctgatatgtggcgcaccgaagcccgcagcgcataaatcgaccgcgccgacggcgtagttcgttgcttccaggtcagtttgaacaaggtcgagccaaccgaggccgtctttgcttgcaacctgctcaccaaagataacgccaggcttgcactcgctgatgaggtggaagaatgctggccaaagatgccgctcgtcagcaaacccatttcctttgcctgccgcgctgaaaggctgacacggacagcttcctgtccatactggtttatcatccggccatcctgcgcggcgcagggcaagtgaccacactccgataccggcgaagaagtggcattgtgtgaatccgcgtaagtcatctggtgtgacatcttcaatactcctttcgtccactacgccaggcgctatatggccggcagaaatgagattccgtaaccactgagcagcgaacggatcgttttcgttgtaaaatgcagtcattgttatttcctcagcatccctgccggtctgtgcggttatatttcaactgcaccctcatccggatattcggtgcaataaaaaactgttgcgtttctgttctcgctttcaacatagaagtcagtctgcaaagtaaattcagtttccatgtcaacttccggtgctcttacggtcattcctgcaaagtcagccatcattctgatctgctctgctgtcagtgtaatttccatcatctctccttatctcagcatccctgcattacgcttcatcctgaaacggtggggttatcagaaggggatatcgtcgtcaaaatccatcggtggctcgcagtgattctgcggctgcggttgttgttgccgtggtcgttgctgctgcggcttcctggctcctgccggcggtgagtcatcattccctgtggctcgtccgctgagcatttgcatcgatccgccgatattcaccacaacttccgtgctgtagcgctcttgcccttgctggtcttgccacttccgcgtctgcaactggccttcgatgtatacctgacttccttttctcaggtattcaccggctatttcagctaacttcccgaacaccacgaccctgtgccattcggttttttctttcatctcgcctgactgcttatctctccatgattcgcttgttgccagagtgatgtttgttacggcgccgccctgtggaaggtaacgcacttccgggtcttgcccgaggtttccaatgaggatcaccttgttaacgcctctacttgccatttatgccgcctgtttaagttcgttgaccctgatgccggttaggcgcttacactcatcctgtttgttgctgccgttcagcattcgccacactttccggtattcagactcaatcgcttttgtgtcacttgtgacattaagaaattctgtgtagtcactcagaatctgctcagggttgcgtggggctacatcgtgaacctctgcgtcagcatcaatcgcagtttcttcagtgggaatacaaaacgcttggaaagccgcgtatttgtaggcaatagacattgccttgttggttgccttgtctccgctatccatagcttcgccaaaggtggccactgtgtgcttgctgccgtcttctgtggcaatgaaatcaaactcagctttcaccacaacataaaataaggtgccgcctttttgtgtctgtctctccgtgacagagcgctctataatgcggggaaggataaccagaccatgtttaaccagtgccggcgcaagagcgttgtatacagcgtcgatacccctgaacatgaacccctgctgagcgttcttcctgtctttcctgattccgttttccgccaaatctctggcgacattacttattgctttgtaaacagcactcattgtctgttcctccagtaatccaaagagaacgccacatccggatcaagatcatcctgttttgataaccaatccagatacccggggttttcttttttcacttcggtaaatgtcattcctttatattttcctaaccgtaatttattcaacagagaaggctgattgctaatttcaatcatttcattgaaagtccatcctgaacattcaaggatcatctgcatcagcgccgcagtaactatgcagtcatatagcgcacggtgcgcgtgaagtccgtcaggcacattaacgtcgaggttgagtgcatatctcagatattggttgctatggctctccatatcaggccatagacgacgagccaatttcagtgtgcaaatgaacggagcttccatctccggcatcatccgtttgtcaaaatcggcattgtgggctaccagataatcagacccgtgatagcttccgatcacgtcactgataaccggcgatgactgaatcatttcgtccgtaatatgatgaacagccatggcgtttatagatattggcttatgtggattaacgagatgtgattgctgtgtggagaagtcaatttcaccatcaactatgtcaatactggcaatctcaacaatcccaccgtcaaaatcacaagtttctgtatctaccactcttagtttcattaatcccccaatttctgacctggccgcgattgcgtgcgcccgtcaccgtaatagtcaataccgccgacacccgtaacttttccatgttctctgtgccattctctccattcctgcgcctcggctgctttccgtgctgctttgatgctttcagggagaggcgggtagcgaagggcggtgatgcggcagatgttgtgaagtgtctcggcaatcctttgctctgacagtgaaggttcatcggtcgattttccctgccgttgcaaatccatttgctcaattgctgatttcagggcgcgttgataattttcctcatacgtcccgccggagcctgcacatttccctatgcgccgtggatattccatcatgtgaattctccgcttaaaaattctgccggcacccgtcctgttggcaatccgacactttcacga

SEQ ID NO: 47 - DNA, 8291 bp, unknown
  Altogen 322075 strain
gtccctttcttcctgttcgcgcttcctgcgctgttcggcgaccagccgccgctcttcctgagcatcctgtactgcgtatgcgttcatgctgcctccttgcgcatcttctccgctatccgtgcgaagaaagaacttccgtgtccggccttgattaactcgtccgtgaaatcatccatgtattcgttgttaatcataaattcgaccagttcgttcatgctccatgctgacgaaccaaggagctgactcaggcttccggtaatgtggtcgaacccttcatgcgttgttactttccggccaagcaccgtccgtgatgatgtttgccctccggatatttccagtctctgcataaatcccccttacatcgccgtagggataacagctacggcggcgacaattacgagtgctaaatactcaacccagcgcggaacatgtttattccgctttgcctgaggcgtagtgatgcgcaccgcgttaaagtcgaacgcagcgcgacaaggtttagttttcatgttgtttacctgctgatatcccaggatgggatagggtgggttagtagttcattgagaggtgcggaacttcgcctttaatcaccaactcaaggaattttgttgcggtactatcgtcaaaccctgctgcaatcagtgcctgtaaagcctcgcggttaaattggcgctgatgttctttgttcgcctgacgctttaattcttcctgcttctggcgctcaacttctgccagtcgtgcgcgttcggccccctctgccttgcgccgctccgcttccactgcggccagcttttcacgctcagccttcgcgatagcttcctgcttttcacgttctgcgcgttcctgcgcctctctggcctcgcgttcacgcttggctgcggcctcgacttcctatcgtgcttttaattccgcagcttcacgttcctgtttgactttcagctccgccgcttcacggtcacgctgtgctttctgttcagcttcgattcgcgcttgctctgccgcctgacgcttgatttcgttttcatgctcaatgcgtttgcgttcttcttcggctttacgcaggtcgtgcagctcattcatctgcagtgcttcttcgtggtcacgctcaatttggcgagctaattcttccgctgctacacgtgccttttctgcatcctcccaggctgttaccggtttgcggatttcttcgctcagtgcgtcgagttcatcccggcactgtttgcgactggcatccacttttttcggcagctctttcagctcatcaacgacagcctttccggctttgtcgatgtatgtttttgactgcgttactttgtaggccagtgatttgatagcatcgcgattcttggctttcgataaatcagtatcgagtaatgcctgctctgctaatgctttctcccggataccagacagcagtacctgaaccttatccggcgctgtaaaaaggtcgagagccgtcgctggttcgataacgaccagttcgtttgccataattaactccgtttatttatagggtgggttacttctgtgtgaaagagagaagggcggctattcgcggccaagtgctttgttgattgcagctttggcttgttcttcaacttccatcgcgtgaccaagataaaacccgtctgctgtaacatccatgccgatgttatttgcgatgttgatatatttagccattgattgctggataccttgcaatgctgataataactccggtgctgatgttattaagttggcatcaggaccgtggtcgaaatagccaatgaaattcccgtttttatcgaacagggcgaaatcattaatccagtcttttttactccacagccccggcgtgcctttaaattccatgttatttctcccttgctctgagcattgcgtctgccatgcggtatgcagcttcagcgaatgaatcaggtttgaaactcatccccattggggtgctttgatggttggctaaaagcccgttcatagcctttgctgcaaaataatccctgatagtcgcatcgctcgccatttctacacggattgatgcgtgttcgtattcctctgtcatacttcctcctatgcacttccctgtgctacgtgatgtccgaatagttatccccgctgcggggtgttagttatatttaacgccgcagaaagggcagtaagacatttttacgcagttactgagacgggtaatattttttgccatctcaccgcttttctttttggctcggtatgcgagtttgtaattgagcattacgtaggatttgccatcttcaagagacagcattttgttatcccaatctgtttcataatcaattatttcgccaccggcaggaacctgttgtgaaatgtgctttttaatcttcccacccatttcattcatgcagttgcacataacgttatcctttcgtgattgtgttgttagtcagtattggtgattggtggcggattaccgcacatacactggctacatggcctcaaatatccaaccgcctgcgcattcaccaatcccaatactgactggatgcccgtctttccgggatgtcagtaattcagcaatattcgtatttaacccgtggtggaactcgccgtgtctacatagggtggaagctatctgcctttgttgttagccttccagatacgcatagtcgtgcttcgtgcgcggttccctaaatttcctttgtcaactatccactttattcgccgtcctggcttaacttgggctaaaactaaattatgcttgtaatttaaaacggccgctgtactcaggcatggcccacataattttaatttctctatcccattcacccagcagacgaatcctctcgtcttgtaattccaggctatcaagtaattttatttttggattttcaagcatgtgattgacacgggacagtagtttttggatgcttgaaacccgctgacgttgttcttcgtatttcatatccatctcctgttattaactcaccatagcccactcaccgaatgggctataattagtatctgcgctcacgcaacccatcaggttatgccctggccgtaataccaccgttcggcataatcggcttgcggttcattctcaactgcttgcgtggtgcttccggtgcatctttcagaccgataatcagctctgcaaacacatctgtttcgtctgccggtcggccgaaaaccgaatcaaaaatttcctccactgagcagcttttaggcttcgctgcatactccgcacgctttctgtcccagaacgccatttgctttgctaaccggcggttcttcgcgttgtctttctttggaataacagtaattgttgccatattgcctcctgagtaatttttggtgattggtggccggtgctgacctccggcaggacttactgattttctcggcctctatcaagtccacgctaccagcgtgattcgtgtatatcgccttactgatatgcctacttcatcttgcccctactggtcgattacctacgcctgatgcggcatcattctccatctactcacaagattgcagcgcatcagcctgcgcattcaccaatcccaaaaaccactcagtggtgatctgacacttattcagatcaggttccagattattaaagagctaagtccgttttatctttggctccgtgccgttgatgggagtatattcacaaaatgtgattttgatgtcaaccacaaaatgtgtttaatggatcggttacgagtaatccttttgatttggaaaggaaaataaatttataggtagtcacattttgtgtgatggatcacacaggcgggggaattgcaggcacaaaaaagccctcgcggggagggctggggtggcaagggttacgctgtaatttttatggttctatcagcgagtaaagaaaattgctccttaaatgatgtcctactttctttcatagtgttcaatgagtgaccaaattgccctgagtttttaatatcctggtcggtaatatcaaacaccggaactgataaggtttggctaattgctattaatgagttgaagtcagatatgtgcgctaaatcatatgcagatagtccattttctgggttctcgtctagaatcccctgaattaatgttttgtcagcaacgcaattaatttcacttaactgtggcactaatatattatcaactgcatccctgatttttgatatccacaattcaaaagattttactggcgcgccgtttcttggtctatatctttgttgaatcataccaataaacttagggtgattctttattgcctttgcagatgcgccatcattgtgtaatttaaacattgataattctgcatgccacttagggatattaatggctaatgatttcacagcctgccaacagaaaaagtcaggtgtggctgggactataaaatagtcgctagacatcaatatcacttcatttaaccctccaacatttgggcttaaatcataaatcacataatccatttcattttggtcagcgattatttgtagggtctttggtaagtttcctggtatgtttcttgtcgctgggataccggctgcaattttcagtgatacgctgatttgcgaatctaattcagaaacaaataaatgacctggaagaaggaataaattttcatttagtgtctctgttaattgcccagattctgtttctaaatatctttctggctgtccgccgttaatcaaaaactcaactattggccccattgttagattatttctactggcgtaaaaatcctcaagaccttctgatattttagagaaaccaagaaccattcctgttaggttgcattgtgagtccaaatccacaagcattaccttctttccttgatttgctaattcccagccaatgttaaatgcagtggtagttttactaactcctcctttgtggttaaagaaacatattgatttagccattttgttaccgccattgttattcatctatattccttattttatcgcatgtagagcagttagtatctatattttgtttgtttttaatttagcaatatcgatgcacaccacaccctaaaacgtgtcgtcaggccactgtgacttaactactttacccactatctggcagttgccattgatagttatcaggtcatagcgcgggttcagcggctctaaatattcaacaccaccatccctgatcagcctcttaaacgtgaactcatcgtttagcatgcgagccacacagaaatccccgaactcaacatcctcttcagggtcaacaagtatcagcatgccttccgggaagcttggtttcccgccctgcggtgcagtcatggaatgcccttcaacctctagccaaaatgctttgttgctggctttctttgctgtaggaatccatgcgacggcatcttcttctgtgtaggcattaccattcgcagtgaaagtcccggcctgtatctttgtgaaaagtgggtactcataattacgcaccacttgctcagctttatctccgaacagcagctcagcaggagatacattcagagcctcgctaatgataatggcatcatcagcacttatcttcctttccccaagctcataattaccaattcgcgaggcggcagaatatccgcacaacttagcaagctgcgcctggcttaacccctttgattcgcgaatcgacttcagtctttcgccgatgatttcgtttattttcttcatactcatcttttaacacaaaccgtgatttaagtatttaaacgttttgtgattgacagttaatcacatattgtgtgtaatgttgtctgtatacatggaggacaccaattatgaacaacattgcagaacagcgaaaaaaattaggaatttctcaagctgttttggcttcatccatcgggtggggtcaatcccggattgctaactatgaattaaacaccaggactccgggattgagcgaatgccgtcagatcgtagaggcgctacaaaaacttggcgccaaatgctcgttagatgacgttttcccaccgcaagctgcataagccaaccgctctttacacaatttagcccgttccggatatgtgctggaacatttttcaacacagcaacacctcacaggaagtgagcgaataactgtatctcaataaggacattatgaattatggaaaatgcaaatccacgcaaatcgtttaaccggtttgtgtcaaatcatctgatggcaactgctcatcaggcactgagaagcaccacacagacagtggttgcaaaactgctcggtgtacacgattcaacagtcttacgcagaacagaaaagttaccggagatatgcgagacattggccgcagccggtatcacagattttgttttgccgggcgagaagaaaatcagcgaggaagagtaccggtttctgtggaagcagatcggtgaactctctctgatgagaacaaaagaaaacgccccggctgttggagcagctgaggcgcattgagagaagcacttaacttttacactgtatcaataaccagtgatttaggaaaggggaatatacggtttccccttttttgatgcagcaaattacggagtaattatacatgaaagtaattacggaacaaagatatggaggtcgctatgactcttgatgaactgacattccataaacagataattgaacatgcaaccatgcccgagggctttcgtttatctggatgggtgtacgttctgagcaatgagtttatgccagggatttacaaagttggcatgaccactatctcgccagagataagagccaaagagctatcttctgctaccggcgttccggcgaaatttaaaatcgaagaaagctattactcaactgacccactcggtgatgaaaaactgattcaccaacatcttgctgattgcagggtgaatgaaagtagagaatttttcagcggagatctggaaagaattctatctgtttgcaatgacataactgaatttagcacttctgcaccggtggaggagatcgcagaccattacgacatcatcagcactgagaagcttggaaagctaaacataggagacctctttgattctcttggcattcaggtctttggttgtcggttggctgcggcagagaggctaatcaggattgctcatcagttcttaattgaaagcaacagaaaaagtagccggtctctttttttacaggatggaacggcttacgtcatcagaagccaggtagatcagatgtatgaaaaataccttgaagaaaccaacgggaaaggcaggccagcggagccaactaccgaggacacaggagtaccattttaatggccagagcaagaaatattaagcctgggtttttcactaatgatgacctggcggagtgtgatccttatgcccgtattctgtttgtcgggttatggacaattgcagaccgtgaaggtcgcatggaagacaagccacgtaagattaaggcaatggttcttccttacgatgatgttgactgtgacaaattactggcgcaactgcatgggaaaaacttcatcacccggtattcagtggacggaaacgattttatccaggtgaataactggaagaagcatcagaaccctcacgttaaagaagcggccagtgaaatacctgaacagttatcgcaagatactgataataaaggagcaccagaaaagcacagtacttgtatggtgcaagaacaggaagagcatacaacaatcccggctgattcccttaacctgattcctgattcccttaaccctataaacacccaagccgaaaaaccggcttgccctgacgagcaaaaaaataacctggcaagtattcaccagatgtcgagcaagtatgcattcgagggagaagtgatccgcctgaaccacaaagacttcgctgagtggagagtgctgtattcgaatatcgacctggagcatgaactgaaacggctggatatcgaattcagggctgaaaagccaaaaaactggtttatcactgcaagccagaaactcaactaccagaacaaaaactcagcgcctgcccgtcgccgtgtcggtgatcgcattgtgcaaccatcgagagcgagtgagttcataccggaggacttctgatggcaacagcagcgcagactctggcgcggtttaatcgcatgaagccggagcatatcaaaccgaaattcacgaatgccgctgagttgatggcgtggcagcgcgaacagggcgctatcgatgcaaaacggatcgccgatgaaaaccgcgttacccgtctcaataaaatcatgggtcgctctggcatcagcccgttacaccaggaatgcacgttcgataactatctggcgacaacgcaggagcagcagcgggcactcagtaaatcaca

SEQ ID NO: 48 - DNA, 94570 bp, unknown
  Altogen 322075 strain
  misc_feature (61033)..(61033): n is a, c, g, or t
tgtgatttactgagtgcccgctgttgttccggcgttgtcaccagatagttctcaaacgtgcattcctggtgtaacgggctgataccggaacgccccatgattttatgcagtcgagccacacggttttcgtcagcaatccgtttcgcatcgatagcgccctgctcacgctgccacgccatcagctcagcagcattcgtgaattttggcttgatgtgctccggcttcatgcggttaaacctcgccagagtctgtgctgctgttgccatcagaagtcctccggtatgaattgctgaacacgcttaggccggacaatgcgttgccgtgttggtggtgatttcggcataaacaagccagtccacccgtttgatatcgattcgtcgattacgctctcaggtgtatacccagcctcgtaaaatttagtcagcctggatatcagcccgtttagtgtctgttttgtcctgatcggttttttcaggtctttccggtaggtaacccagctcacccaggtatcacggctcaaccagtcaggcagcgggtgtgcatttgcatcaaagggttctggcttggacggtttttcaggtttaggggatataggggtatatatattttcttttttctttaaagtatttcttttgtgtgtctccaaaccagagacatcatttgtctctaacttagagactttttttgtctccagattagagacagtgtctctaagttgatttttccacgccgaaacctccttgttaaccccaatcttattgccatctttcacgatgtaattcattgaaattaattcgttctttgccttgttaacgttctgacgggacaggccggtaatttccgacagctgagaatctgctatccggtcatttttcttcccgaacccgtatgtttttctgatcagtgccaacattacccggaactgtctggctgtcagattgcagcatgaaagagactccagcagttcgttggcgagtttagtgtaaccatcgtccaggtctgccactcgtggttgctcctgcttaacagggaattcatacacttccgctgtattcatagcgacctccatatctttgtttcataattactttcatgtataattactccgttatttgctgtatcaaaaaagggaaactttatgtttccctcttttcaacaatactggctattgatacagtgtaaatattaagtgcttttcttaatgcgcctctgctgctccaacagtcggggcgttttctttgattctcatctgagagagttcaccaatctgtttccacagaaaccgatactcctcctcactgatttttctctcgccaggcaaaacaaaatccgtgataccggccgcggctaatgtctcgcatatctccggtaacttttctgttctgcgcaggattgttgaatcgtgaacaccgagtagctttgcaactaccgtctgtgtggtgtttctgattgcctgatgagcagttgtcatcagatgatttgacacaaaccggttgaacgatttgcgtggatttgcattttccataatgtaaattccttttggtatagatagtccgtagctcacatcctgtgaggtagttttatatgtaaatcgtcactttatcagtgactccgtagcagctaacagctctgcgattgttaaagagcctgggtaactacatatacctctgcggatacaaaatctgcatttcagtgatttttttttcgtaaaatttcaccaatttttcagcaatctcaagtgatgccgtctgagcgccacgctccaaacgactgaggttcccgacatcgtagttaattgcggccgccacctctgcaattgttaattgcttttccaaacgaattttccttaaaggcgttatttgcatatctcactccaccttgaatgcgccatacgcatattaccatatactttgatatgcgcaatacgctttgtgtgagacgcataaataaagttgaatgataatatgaaaataggaacaaaaattagagctctcagaaaacagaagggattaacaatcctgcaattagccactgctattgatagcgacgtggggaatatctctcgccttgaaaggaatatccaaggctactccgagagcacattaacaaaaattgcggctgctcttggtgtcacggtagccgacctattctccgataccactacacagcaacaagatgataatgttgagtttgttggattcgtccccaatggcatggttaaagtagttggggaagcattcctggggattgatggcgcagtggatatgatagaggcccttgagggatgggttcaaatttacagcgatgataaggacgcttatgccctcaaagttaagggtgacagtatgtggcccaggattcagtcaggtgagtatgtggttgttgagcccaacacagtagtcagatccggcgatgaggtctttgtgcgcactgttgaaggtaagaacatggtaaaaatactgaataaaaccagagatggtagttaccaattcaccagcgtcaacaatactcacccgccaatcacagttgacccacgtgaagtggaaaaaatgcattatgtggctgcgattgtaaaaccgactaaatttatcgataagtgcgaacaatcataaaccagtactgataatcaaacgagttctaaggacaaactatggcattcaatgacactgaagtcgtacaaattaaacaatttatgaactatttcatggaaaagcgtcgtccaccaaagcatatccgggatgaacatgatcttcagtatcgtattgaagacgatagcgtaatcattttcgaggttagacaactgtcctggagcaccggacgtgcggaagaaatgctggccaaaataacaaacaacagaaacagcaactcgtggtctctgttctggtctactgagaataatgaatggcgacactacgacggccgaatgataggcagtttttctgacgcaataaaaattattgatgaagatgcaaatcatcgattctttggctgacagcctgatgacatattttagagtaaggtggtaggtgtagaaatacataataaggatatgacagtgataaaagttggcagggctatcctggcggtgaacgcataggtgaagggcagcataaccccagccctccccgcgagggcttttttatatcaattatcgctcatcaggtcgatagcaacctcataaacctcattcataaatctgtctatttcttgttctttatgggagtacagcaattgcctgatatttcctttcgttatcatctgccgtgaatccagtaacataatagccgctctgcctgttactctgcatacttcactgtaaatcagttctcgttcgtcactcattcatcacctctgtatatttattcaacaataacatccacagcagcgcttggacagaaaataattgtatattttttgttccgccccatgtgatctacgccagattttgacgattttaaaaaagacaaatcccaaataaaatcaacaatataaatatcttaaatcttatctaacattacccaagctaaaatatgcgcttgacgcatttgcgtcaaatgcatatcatcatatccatcaacggaacacagcacgttgatgttctttaaaaacgatgatagcgagctgtgtattggctgtcagaacggtgacgctgataaagcgtcagccttctcagaaggtttcgggattgaagcaacacatggttgtaccaatcgccaaagccgactgtttggaggaaatatggcaataatcatagtgaaaaaatcacgcaagcctgaatttttacatggcaactcagcaaacaggcgtcacgccaggagaaaggctgaagcgattgccaccaaaaatgtaaaaatgaagttggaggaaatattcagaactgaaccggacaaaagcccaatgagccgagtagaaaaagccacatccgcatgcagcaccccagtttatgattcaccggacaactgctgcttaaacacaactgccctatattcaactaagcgatataagtcaaaaccaaaaacagaatttggtatcacggccagagcatagcccatcctatgaatgggctgaccaagtattacttaaggtagagcaagtccagtgctgctttctctgcatcttctggctcatcaaatgactccagaatgtgcgggtaccttgctgcctgactcaaacttttaatatttttctcaatttcggatttttgctcggtagtcagcgcgtcaaaaattgattttagcaaaatatgctgcgcgtccagacgctttgcaatcacttcattattcatcttatttatctcattttatagggttaaaagcatcttaacggatttctatctgtaacacacggtacctcatctgatatggttaaaagcagacacttcaccccatcacatttacggtggatgttaggttaaataaaacaggagatggatatgacgtctagcaataagtactgcatcgactgaattgagctcatcacatgttgctcaggcagaggcgtatgccggaagctgctgcaaagagtgcaacaatgagaacatagagccaacagataaaagcatttttgattacctgaaatatatcgggcgtcttggcgtctgacagcccaggatacgatcccacagtcagtaatctgaaatttatattttctgcttcagaatagaatagtaacagtctgatatcttaattagattaaccccggggcggacgctggattcaacaacttccaaaacatctttatcaatcaaacgctttgctgcttttttataaattctgattttcctttttttgtattttccattaagaaaatatatcagtaatgcgcgttcttcatcatcgaaattatttattaccttaggagcttttatgaatcgaaaaattactttttttattagctcactcattatatctccatagtttattgaacatatgaatgatattttagcataaaataatatacgattttactgaaattttaacttttctcgcaatacggggataactattcattcatcacgtagcacagggatgtgtataagaggaattacctcggataaaggaaatatccgattaccgcaaggaagataaagacaacaacaggaatcccgatagttaatttcagatacctgatgaatgacttggttatagctttttctacagctttctcaatgatcgtctcgagttgttcaggggttaaattcataactgctctccttagtttttctaactatatccggggagcgggcattgtgccagagtgaaattatgcgccattaatttatggaaaaggcagttggaatataactgccttaatgtccatcagtaggaaacaaacataaatgagacaggaagaaaaaagataccgccaggaatggttgctgtaatcaaaggtaataaagcaaaagcctccataatctgctcctcattgttatcactaaatatattttaatcagcatcaataaaatttaaatatatcctttatttttcaggtatatccgtaggtaaacaacatgaaaactaaaccttgtcgcgcttcgtgcggttctgacgtggcgtgcatctctatgccatttttacgccttgcccgatgtgcggcaagggtagcgatatccaccggaaagtcccgtatttgggatctggctaaccaattacagatgagagcttacgggagaaagatatgtcgctgatgactgcaaaacaaaaacacaccaaggaacaggttattgagttgttcaatcaggctgacatggatgaaaagcagattgagcagattgtgtcggagtggcgttggcgcagggagaacgccaaaacaagccgcattctccatcagtgcagaatgagactaccagcatgaacacatacacaatacaggatgctcaggtagaacggcaacggattgccgaacagcgcagaaaacaagagcagaaagaaaaggatgattactggtttcgtgaaagtgtcggattgccaaacggacgggtaccggcagaatttttaagcggagaattcacatgatggaatatccacgccgtatagggaaacgttcaggctccggcgggacgtatgatgaaaattatcaacacgccctgaaatcagcaattaagcaaatggatttgcaacgacgggggaaaccgaccggagagccttcactgtcagagcaacgggttgccgaggcactttacaacatctgccgtatcaccgcccttcactatcccccactacccgcaaacatcaaagcagcacggaatgctgctgagacacaggcgtggagagaatggaggactgaacatggaaaagctaccggtgtcagtggtgttgattattacggcggcgggcgtacggaatcacgccccggccagagattgggagattaatcatgtctgaagtctataaggcaataagtgccgtagccaaggaactggctgagacaggcatcaaaaaagggagcaggaattcacaacaggggtttatgttcaggggtatcgacgctgtatacaacgcacttgccccggcgctggttaagcatggcctgattatccttccccgcattatggagcgttctgtcacggagcgacagacacaaaaaggcggtaccttattttatgtcgtggtgaaggctgagtttgatttcattgccacggaagacggcagcaaacacacagtgaccacctttggcgaagctatggatagcggggacaaggcaaccaacaaagcaatgtcaatcgcctataaatacgcagccttccaggcgttctgtattcccaccgaagaaactgcaattgatgctgatgcagaggttcacgatgttgccccgcgcaaccacactcagattctgagtgactataccgaatttcttaatgtcacaagtgacacaacgacgattgaggctgaatacagaaaagtgtggcaaatgctgaacggcagcgacaagcaggatgaatgtaaacgactcaccggcatcaggatcaacgaacttaagcaggcggcataaatggcaattaacgtaattacagtcagcggcaatctcggaaaggattgtgagcaacgatggactccggcagggaaagccgttgcatcgttcagtctgccggttaagcagggatatggcgagcacgaaaagacatcgtgggttatctgcaaaatgttcggcgcgaaagctgagaaattgccagagcacctgaaaaaaggaacgaaggtgacggttattggcgagtttgtcatggaggaatggactgatcagaatggcagtaaacggtctgcaccagtgattatcgtgaatcaactggatttcggcggcaatcaggcaggaggccagaagccgcagacgcagcaagctccagcacggaatgagccaccgatggattttgactatgatgttccgttttaggatgaaacgtaatgcagggatgatcaggtagacggaagcgttaagttataaccccacagaaagcagagaacggacgcagacgaatagcaagggattgcctgacggaattaatgcagcacacatcagacgaacaacacaccgcaatactcgacaaatacacaccgaaattcaaaccacttaatcacccgtgctttcctgagaagaaagtgcccgggtattacgtgcgtacgttacagcaggaggatgaagtatgggggttgcaactaaacccactttaaccagaggcagagccctaactttatattggccgacggtagacgcctacccgatgaatagcagtgaagcctgtgccttcatgggaatatcttaccctaccctgaaaaaatggattgattccggcaggctgtccggctcgagaaaagatccgcttaagcccaaatcgccatggcagtttacccgtgcaaattgcattgcagccatcaactacaaaatgcacaatacgccggaaagcgtgattagtgcggaagaggaaaggatatgtcaatcttccggagaggcgagatatggtacgccagttactcgcacaatggtaaaagaattaaggagtcgcttggtacaacggacaaaaaacaagcgcaggagttgcatgataaacgaaaggccgagctgtggcgcgtaagctcactgggtgaaactccgaaggttacttttgaggttgcctgtacgcggtggctcgaggaaaaatcaggcaaaaaatctcttgatgatgataaaaccaaaatactgttttggctcgatcactttgaagggatgcacctggcagatattgatgagattaaaatctatgatgctgtcagtaagctgcaaaatcagaagctgaaagaaaattgggaaaagcatatttccggcaggaagcggcgcgcagtcagtaaaaaatcagagccggtttctgtagcaaccaaatctgcttacctggctttcatcaagtcactgctccgcgccgctgaacgcgactggaagtatctcgataaagccccgaatatccgggtgccaaaaccgaagaataaccgggtccgatggctcgagccacgggaagcaaaacgcctgatcgatgaatgcagtgaacctcttaaatctgttgtgacatttgctctggctaccggcctgcggcgctccaatattattaacctggaatggtcacaaatagatatgccgagaaaagtagcgtggattcccccggatcagaccaaatcagggaaagcattgggtgttgctcttaacgacactgcgtgccgcgtcctgcgtgagcagataggcaatcacacaaagtatgtttttgtgcatacgaaggctaaaaacagatctgacggctcaatgactccggttgtcagaaaaatgcgcgttgacggtaatactgcgttcaggactgcacttaaacgtgccggtatagaaaacttccgttttcacgaccttcgccacacatgggcgagctggttaattcaggcgggagtaccgctgtccgtattgcaggaaatggggggatgggaatcaatagaaatggtacgccggtatgctcacctggcaccaggtcatctgagccagcatgcgcagcaaatcgatgctgtttttggtgaggatgtcccaaatatgtcccacccgaccctgagtgtggttggtgagcacaaatgaaaaacccgctaactggttgagagttaacgggtttaatatggtgccggctaccggagtcgaactggtgacctactgattacaagtcagttgctctaccaactgagctaagccggcgaatttggcggaaggatagagattcgaactctaggacggtctcccgtcggcggttttcaagaccgctgccttaagccactcggccatccttccatggggcgcgattatgctgaaaaatgaggaacctgtctacccctatatgcaaaaaaatccgatttttttgtctgcctgctcaacattcgtgcatcataccggccctgcggcggaatactgctgttattgtgacgggaattagtatgatagaattaattcccggtgaatttacagtcaagtacttactataaggtcgcaacggaacatatgtacagacagtcacattccaagccttatgcgatacccggcttttatgcatcatttgtttcgttattagtcttatctctctttttatacggatataactattacgatgcctggctgggaagcaaaaaaggcgcactctacagtttcagcagccggatagaacatcaggttgaaacgtaccgctatcagtccgctgagctgttccggctcgccaataccgcggacaccgagaagcggcctgagctcgttccgccgcataagatcctgaatgatatttactggattgacagccgtgtgccggttgtggatgccatcctgttcggccagaccaatgatgagacctacgccatcgcacggcgtttttcagactatctgaccattctgtggggcggtgagaatcagttcaattctgtgtattacctcaacgggctggataacagtctgctgctggtgacatcccattctgccctgcgtccggagctgcgctaccgcgaaagcccgctgacattgggtgccgatgaaaaacgggcggaaatgctggcggattccacagcgctggatgagcgggaaaccctctcctcctttaccaaaatgccgtcagaatcaacctattactatacctaccgcgcaatgtttaataaccccggtcagctgaccagcgtggtggcgtttgatttaccggtgaataacctggtgccggataatctggatctgtccaatctgtcactgatcccggccgggacccacaccctcagcaaccgtccgaatgcggtgcagatcagtattaacggcctgtcactgaaactcagttaccggctgcgtgaaatgccgtatcaggtggtttatcagctctcactgctgtctctggccgaagagatgctggcggccaatatctggctgttaatctctgtcttcctgttcagtatgctctctgtcggcggccttgtttatatccgcaaacggtttatttccccgctcaatacactggtccgccaggccagaaacagtgaggcgataaccaatgaaattgtggcgcaactgcctatcgggctggcgatttatgattttgccgccaataaacggctggtcagtaataccatcgccagtcagctgctgaccctcagcgacctgaacaaaacccgtgatatggcccgcgagcaccagggccggatccagaccaccattgataatgtggtttatgaagtcagtatgaatccggtccgtaatatgaatgatacttatctgattctgttccgggatgtggaccaggaagcgctgactgcgcgccgcctgcaattgtctgaccgtgagtataagaaaagtatcaaagcccgtcagtctgtgctgtcaaatatccgttcagagctggtggtgccggtcaaacagctcggtaatgacctgcatacgctggcaccgtatgtgactgatcccgccggcggcatgctgatggataaagtggtaacggaatccggttatctgtgtgagtggatcgaaaatattattctgctggctgacctggaaagtgatgactggaaaccgactaatgatgaattcctgttgtcacagaccgtcgaagatatcgttaaacaattctcacgtcagataaatgacaaaggcattccgctctatttccataatagtattaataagcaacttaattacattggtgacggccctattatcagtaagatatttttattattactgaattatgctgtcagtaatttaaaatacggaaaattggttattcgccttaagaatatatttaaagatgaacataataatatcagattggaaataatcgccagcggctccggtctgccgcaatcggatctcgttaatctgcacgatccgtttatgtttcaggtcgcagagacggaaggtcgtccgaactcggggctggcattctatttgtgtgatttattatgtaaaaaactcagcggagagctgaaaatagacagtaaacctgacatcggcacacactacactgtcgagttgccgctgcctgccaccgagatgatcggcgagccgtcagaggtgctggaagatacgctgtttaagatcaatatcattaatccgagtattcgggaaataattaacgcaattataattgaaaatggcggaattttatttgataaaaatcgcgcattattgcaagatgaatatgacatcctgataactgactttgataagaaagcgagaaagccaatactctttttacgaaatgacattattgaacacagaatgattacgccttcccttgtggagtgtaattataatttcaatgatgaaattctgaatgctattacgctgcttatcgaacaaagcttaacttcggatgagtttgatgatagattcttacccgggaatccgggtattaatacagcagcgctttccgtcggggaagttgttgcgttatataaaaatcagctggcacaaagtacgtataaagacttgtttgccaccacagtccctcctgatataagtaagatgtacacggaagcagaattaagtgaattgcagccactggcgctgacagtacatcgggtcaaaggggtctttgctgtgctcgactttgattatctgaaatcacgctgtgaagatatagaacgctgtatcgctgacaaaaacaaaatgaaggtggatgaaggtatccgggaaattgatgccattgtcactgaattgctgcagcaaggtaaccaagagtatgaataacctgaatgttattatcgctgatgaccatcctattgttctgttcgggataaaaaaatctctggaacagctggaaacggttaatgttgttggtgaatttgaagattccacttcactcatcaataacttagcacgtctggatgcggatgttctgatcactgacctctccatgccgggagataaatacggtgatggcatcacgcttatcaagtatatcaagcgccattatcctgacctggcgattattgtgctgaccatgaacaataatccggcgatcctcagtgccgtactggacctcgatatcgaagggatcgtactgaagcagggtgcgccggctgatctgccgaaagcactggcctctttgcagaaaggaaagaaattcacccctgacagcgtttccaaactgctggaaaaagtgaatgccaacgggtacggcgataagcgcctgtctccgaaagagagtgaggttctgcgtctgtttgccgaagggcatctggtcactgagattgcgcgtaaactgaaccgcagtatcaaaaccatcagcagacagaaaaaatccgccatgctgaaactgggtgtggataacgatatcgctctgctgaattacctttcgtctgtcactatcgacagccacagagacgagtaaatccggacacgttttacagtactgatacaaaaccgccgttcagatgaacggcggtttttttatgtgcccggttattctgccccgggcggtgtgacctgcgggatatagtgctgcatcatggtgcgcaatgcctgcatagagaccggtttggagagacaatcgttcataccggaagccagacagcgctcgcgctcttccgccatcgcgttggcggtgatcccgataaccggcagtgtcatccccttctctctcagtgtacgggtcaggtcatagccgttcatattcggcatgttgacgtctgacagaataatatccacctcatgggtttcaaggaagtcgagtgcatccagcccgtcatccgccgttgcggtgtggaagccgaacaggtgcagctgatctgacagcagatggcggttaatcggatggtcatccacaatcaggatccggacatgtgctgcctgctgactgtccggcagtggcggcggcggcagatcatcggcttcctgacggcggttattcagacggtcagagacaaaatcaaacagcccgtcgagctgatgggtgttatgccgccagtgattaccgcccagcggcaccggtttgtcggtataaccggcatccagttcaatcagcagacgcgcctgtttcattgccggggtcaccacgtccgtgatcaccactgcacaggcaatatcagggcattcagacaacggaaccgctgccggggcaatatcctgccagtaacgctgcatataatccgccagcatgccattgcggaaatcaaagaccagcggtacggtcagcggcacaatatccgcatgatgaccggacggataagcggtatagcacgggaagcggatcccgaacaggctgccgacctctttctgcgattccaccatcatgtcaccgtccatcagtgaaatcagcttttcacagataggcagcccgagcccggtaccctgcgacgggctgtccgtgttcggcataatctgatagaacgggtcgaataactggcgcagctcgtcctcactgataccgccgccggtatcctgaatatccacatgcaggtattcaccgcagacatagacgtgaatacacaccatcccgacatgcgtgtatttaatcgcattattaaacaggttggcgatcacctgctgcatccgtaccgggtcattacagaccagctccggcacatctttttcaataaagcaatacagagaaaggtgttttttcgccaccagcggcaggtagtttgccaccacaaaatgaatatgttcgcggaagttaaactctctcggctcaattttcagctgcttggattcaattttggagaaatcgagaatatcactgataattttcagtaataatgaagatgagttattcatcgtgccgagcaggcgctgagcatcctgcgaatgcgccatggactgcaacagctccaggttaccgatgataccgtacagcggcgtgcgcagctcatggctgaccgtggcaaggaacatggatttcgactggttagcctgctctgccgcctgtgccgcatcctgtaacgagctttccagctgcacacgggcgctgatatccaccagcacacaaatcgccacttcctcgttctggtaacgggaatgcacaaaactgacctgaaggtgcccgccgttacgggtcaccatatcttccattccctgccgtttatcttttatcagcaggccgatgcggttgcgatcctcaaacgaaagcatacgccagtaattatgagccagctcattactcagcaatgccgtaccgtcgagtgtgcgcagaatgcaaatcccgaccggtgcggaggccacaattttgtggttgaactgctcgtgctcctccagacgcatggcgctgttttcggccggcataaatatccgtcgttccagcagccaggtaaacaacccgataataatggcggagatcagattaagaatcgccccgttgaggatctgaaatttcagtttttcatagattgagctcagcggcgtggtatataccacactcagcagcgacggcgtcagtctgcgtttaaagaccagttgggtgaattcgtcgtcatagccgaaataattatcgtccaccagataacggtctttatttttctgtgtgttaatttcttccggataagagagcacgacatcatcctgctcattaataatcaccatattggccgggaaatcgcgcaggcggttaaagttttccagctgcagattacgctcaatacccatcagtgccagaaaacgcccgtcataatacagcggcatcatcacaaacaggctggccattccctgattactacccggcgccgcccagtaaatggtgcgctctttcccctgacttttcaggcggaaatagttctgagagtaatcattgaccattctgcgcagcgtttcgctgctggtggaaaggttgcggatcggaaatgacaccatacacagggtttttgagccgaccagaaagacctgattcagccccatcggtgcggcgatattgttctgccagtacgtcaggagatctttgaatgcaataatatacgggccgctgccggtgcggaaggccgcgcagtcgcctttggtattcagtgcccggtaatcaataaaaaagccgtcggtggtccggtctgcgggctctcccggccgtacttctttattttcgacaaaccgttcattcatataacggatatcgcgggtcatatcggtggattgccggaaataggctaataaggcatcgtaatcggaataatattgctggcggatatcattgcgcatcccgttatagatattcagtaaatagaataccgtcaccagcgcccccagcccccataacatcacaccgacgatccggaacaggtaacgcgaaattttcagtgatgtctggaaagatgaaaagtatctcaaaggggctccgccaataatgaatctgatatattcacgaggtttcagactgttatgtctaggatataccactgtgcaatgtttacaaaacccccggggtaaataaaaagcaggaacaatattattgttcctgctttatcggtttttctgattttatattaccggaaaccggtgatattaatcgttattctcttctgcattatcatcagatgccgcatccgtcacttcaccgtcttcagagaaatcattttcatcctcttccggctccgcaacacgctgcagaccgaccactttctcttcttctccggtacggatcagtgtcacaccctgggtattacggcccacgatactgacttcagagacgcgggtacggaccagtgtaccggcatcggtgatcatcataatctgatcatccgcaccaacctggattgcacccacgactttcccgttacgctcactcactttaatggagataaccccctgagtggcgcgggatttggtcggatactccgcttccgcagtccgcttaccgtagccgttttcggtgaccgtcagaatttcaccttcaccgcgcggaataatcagtgacacgaccgcatcgtcatcacccagacggataccgcgcacaccggtggcggtacgccccatggcacggacagcatcttccgcaaagcggacgactttaccgtcagcagagaacagcatcacttcgttgctgccgtcagtcaggtcaacgccaatcagctcatcaccctcattgaggttaacggcgataataccggcgttacgcggacggctgaagtcctgcagggaggttttcttcacggtaccgctggcggtcgccataaagacaaacttaccttcctcatattcacggaccggcagaatagcggtgatacgctcgttctgttcctgatccagcggtaatatgttgataatcggacgaccgcgcgcaccacggctggcttccggtaactgatacactttcagccagtacagcttccctttgttggagaagcagagaatggtgtcgtgggtatttgccaccagcagacgttcgataaagtcttcttctttgatacgggcggcagatttacctttcccgccacggcgctgggcttcatagtcggtcagcggctgatacttcacgtagccctgatgagacagtgtcaccaccacgtcttcctgactgatcagatcttcgatattgatatccgcagtattttctgtgatatcagtacggcgcttatcgttgaactgctctttcacggccaccagctcttcacggatgacttccatcagacgttcaggactttgcaggatatgcagcagaccggcaatcagttccagtaactcgcggtattcgtcgagcagtttttcatgctccagaccggtcagtttctgcaggcgcagatccagaatcgcctgagcctgaacttcggtcagatgatagagaccgtcgcggataccgaactgctcatccagaccttccggacgtgcggcatcatcaccggcaccggccagcatagcggcaaccgtacccagttcccatgcctgtgccagtaacccggcttttgcttccgcaggcgtcggcgcacggcggataagctcgataatcgggtcgatattggccagtgcaatcgccagaccttcgaggatatgggcgcgttcacgggctttgcgtaattcgtagattgtccggcgggtcaccacttcacggcggtggcgcacaaacgcactgagaatctctttcagattgaggatcttcggttgtccctgatggagggcaaccatattgataccaaacgtggtctgcatctgtgtcagcagataaaggttgttcagtaccacttcaccgaccgcatcgcgtttgacttcaatcacaatgcgcataccgtctttatcggattcatcacgcagtgcgctgataccttccagacgtttctctttaaccagctcggcgattttctcaatcaggcgggctttgttcacctgatacggaatttcattaacgataatggtttcgcggccggttttttcatccgtttccacttcggcgcgggcacggatatgaattttgccgcgtccggtgcggtaagcatcgagaataccgcggcggccgttgataatcgccgcagtcgggaagtccggccccgggatgtgctccatcagaccttcgatgctgatatcttcatcatcaatataggccaggcagccgtcgatgacttcacccaggttatgcggcggaatattggttgccatcccgacagcaataccggatgaaccgttcaccagcaggttcgggatgcgggtcggcatcacatccgggatcatttcggtaccgtcatagttcggtacaaaatccacggtttctttgtcgatgtcggctaacagttcatgggcaattttcgccatacggacttccgtataacgcattgccgctgcggagtcaccgtcgattgaaccaaagttaccctgaccatccaccagcatatagcgcattgagaacggctgagccaggcggacaatcgtttcatacacagcactgtcaccatgggggtgatatttaccgatcacatccccgaccacacgggcagattttttataggctttgttccagtcattacccagttctttcatcgcgaataatacgcggcggtgaaccggtttcagaccatccctgacatcggggagcgcgcgtccgacaataacggacatggcgtaatccagatacgagcttttcagctcctcttcgatgttaacgggcaagatttctttggcattgtcgctcatggagccagtatccctcattactccggattcaaggtgcggaactataccacaaatcgccaatgtttaaaaaaggagatataaaaatcgggagagtattttatttctgacgcatcggcgcccggcattgtatactgacgccatcgcgtattccggcaggttctgccgcagcaagagagagaaagagaccatgaatgacacagcttccccgctgacagccaatgtcgatcctgcggaaattaaaaagtttgaggatgttgcctcacgctggtgggatcttgagggtgaatttaaaccgctgcaccggatcaatccgctgcgtctggcctatattcagcagcgggttaacggtgtgttcgggaagaaagtgctggatgtcggctgcggcggcggaattctggcagaaagtatggcgcgggaaggtgcggacgtcaccgggctggatatgggcgcggagccgcttcaggttgcgcgtctgcatgcactggaaagcggcactgatatcaactatgtgcaggaaacggtggaacagcacgcagaaaaacatgcgcaacagtatgatgtggtgacctgcatggagatgcttgagcatgtgccggatccggcgtctgtggtgcgttcctgtgcccgtctggtcaaaccggggggcgatgtggtgttctccaccattaaccgcaacaagaaagcctggtttatggctgttatcgcagcagaatatattctgaagatggtaccgcccggtacgcacgatgcgaagaaatttatccgtccggcagaactgattgactggctgaataataccggtctgcgtgagcaacatatgatcggcttacattacaacccgttaagcgataaattctggctggcacccaatgtggatgtaaattatatgttgcatacccgttttattttatagtgtcaagttaattactccggcgattaataaaacgccaaacaaatcgcatttttctaaaattatcgcttcgcgtaataaggtaagcacagtttcattttgtcagggatctcagtgcttaccactctgtcagcgggtgactatcctcaagttatccacaaaagatcctgattttatacacttgatcctgagcgcatttatcattatcttgttacccatcttttacagacacactacatcttgtgtttaaatcgctcagcacccgctattgactttcccggaacatttgtttcagggatcgttttttatcgggcagatacacgttatcagcgcgttaatcacaacagggtgtcattttcaaaacagggtatatcaactgatgaaccagaatctgcttgttaccaaacgtgatggtcacaaagaacgtatcgatttagacaaaatccaccgcgtcattacctgggccgctgaaggtctgaataatgtctctgtctcccaggtcgagttacgttcccagattcagttctacgacgggatccgtaccgcagatattcatgaaaccatgattaaggccgccgccgacctgatttccgctgaaacgccggattatcagtatctgtctgcccgcctggccatttttaacctgcgcaaaaaagcctacggccagtttgagccgccggcgttatacgctcatgtacagaaaatggtagctgccggtaaatatgacgaaaatctgttaaccgattacaccgaagctgaatttgaccagatgaatgagttcatcgatcactggcgtgatatgaatttctcttatgccgccgtcaaacagctggaagggaaatatctggttcagaaccgtgttaccggcgaagtgtatgaaagtgcacagttcctgtatatcctggttgcggcctgtctgttctcgcattatccgaaagagacccgtctggattatatccgccggttctatgacgccacgtcaaccttcaagatttccctgccgacgccgattatgtccggtgtccgcaccccgacccgccagttcagctcctgtgtgctgatcgagtgcggcgacagcctggactccatcaacgcgacctccggtgcgattgtcaaatatgtgtcccagcgcgccggtatcggtatcaacgcgggccgcatccgtgcgctcggcagcccgatccgcggcggcgaggcattccacaccggttgtatcccgttctacaaacatttccagaccgccgtgaaatcctgttctcagggcggcgtgcgcggtggcgcggcaacgctgttctaccctatctggcatctggaagtggaaagcctgctggtactgaaaaacaaccgtggtgtcgagggcaaccgtgtccgccacctcgattacggcgtccagatcaacaaactgatgtatgaacgcctgatcaaaggccaggatatcaccctgttcagcccgtccgatgtaccggggttatatgacgcgttcttcgccgatcaggatgcgttcgagcgtctttatgagcagtatgagaaagatccgtctatccgcaaacagacgctgaaagcagtggaactgttctccctgatgatgcaggaacgtgcctctaccggccgtatctatattcagaacgtggatcactgcaacacccacagcccgtttgatccgtttatcgcgccggtgcgccagtccaacctgtgtctggaaattgccctgccgaccaaaccgctcaacgatatgaatgacccgaacggggaaatcgcgctgtgtacgctgtccgcgtttaacctgggtgccattgagaacctcgatgagctggaagagctggccatcctggcagtacgtgccctggatgccctgctcgattaccaggattatccgattgaagcggcacgcaaaggctcgatgggccgccgtaccctgggtatcggggtgattaacttcgcttactacctggcgaaacacggcgtgcgctattccgacggcagtgccaataacctgactcaccgcacctttgaagctattcagtattacctgctgaaagcgtccaatgagctggcaaaagagtacggtgcatgcccgtggtttaacgaaaccacctattcacagggcattctgccgatcgacacttacaagaaaaccctggatcagctgacgaacgagccgctgcattatgactgggaaggcctgcgcgaagagatcaaaaaacacggtctgcgtaactccaccctgtctgccctgatgccgtcagagacatcctcgcagatctccaatgccaccaacggcattgagccgccgcgcggctatatcagcgtgaaagcctcgaaagacggcattctgcgccaggtcgtgccggagtatgaccgtctgaaatccgcctatgagctgttatggcagatgccgggcaacgaaggttatctccaactggtggggattatgcagaagtttgtcgatcaggcgatttcgtccaacaccaactatgatccgacccggttcccgagcggcaaagtaccgatgaaccagttactgaaagatttgctgctggcctataaatacggtgtgaaaacactttattaccacaatacccgcgatggcgcggaagatacccaggaagaccttcctgaggaagtggtcatcgccgacgatgatggttgtgaaggcggcgcgtgtaaaatttaaggtgaataaataatgtcttatacaacattttcgcaggtacataatgatcagctgaaagaaccgatgttcttcgggcagcctgtaaacgttgcccgttatgatcagcagaagtacccgatttttgaatcactgattgaaaaacagctctccttcttctggcgtccggaagaagtggacgtatcccgcgaccgcattgactacaacgccctgccggatcacgaaaagcacatttttatcagtaacctgaaataccagaccctgctggattccatccagggccgcagcccgaacgtggcgctgctgccgctgatctccattccggagctggaaacctgggtggaaacctggtctttctcggaaaccattcactcccgttcttacacgcatattatccgtaatatcgtgaatgacccgtcggtggtattcgatgatatcgtggcaaacgaagagatcatcaaacgtgcggaagatatttccggctattatgatgatcttatccgtatgaccaatgaatatcatatgttcggtgaaggaacgcataccgcaaacggtaaaacttttactgttaccctgcgcgccctgaaacgccaactgtatctgtgcctgatgagcgtcaacgcgctggaagcgatccgtttctatgtcagtttcgcctgctctttcgcctttgccgaacgcgaactgatggaaggtaatgcgaaaatcatcaaactgatcgcccgtgatgaagccctgcacctgaccggcacccagcatatgcttaacctgctgcgcagcggccaggatgatccggaaatggcggaaatcgccaaagagtgcgagcaggattgctatgacctgtttgtccgtgcggcggagcaggaaaaagagtgggcagattacctgttctgcaacggctctatgatcggtctgaacaaagatatcctgtgtcagtatgtggaatatattactaatatccgcatgcaggcggtgggtctgccgctgccgttcaaagtccgctcgaacccgattccgtggatcaacgcctggctggtatccgataacgtccaggtggcgccacaggaagtggaagtcagctcctatctggtcggtcagattgactctgaagtcaacactgacgaactgagtaacttcgaactctgatgccccgctataaaatcaccctgcatggcaacatgcagggtattcagctgcattatgtcagtgaagaacacaacaacctgctcaatacactcgaacaatctgtcccggtggaataccagtgccgtgaaggctattgtggtgcctgccgtgtccgcctcaaacgcggtaaagtcggttaccggcagcggccggttgcatttatcaatgacggtgaaattcttccctgcagttgctacccgctgagtgatatcgacatcgaactgtaagctgttttgtgaccggatctgcaatccggtttttttacgccaccagtgtaacgatatctttacaatatacgtaatttaaatttgacacctttcctgtttttcattacgctttgctcacatattattgattgaaatatcatgaggttttggtgaaaaatcgtacactgggaagtgttctgatcgtcgcgggaacgacgattggtgccggtatgctggcaatgccactggctgccgcagggatcgggtttccggtcattgccgtcattctgatcggcctctgggctattatgagctataccgcactgctgatggttgaagtgtatcagtacagctcaccggataccggcttaggcagcgtcgcccgtcaatacctcggattaccgggtcagctcctgaccggcttcagtatgttattgctgatgtatgccctgaccactgcctatatcggcggtgccggggaaatgatctccgccagcctgcaaaactggtggcaaatatctgttacacctggcaccgcaaccattatcttcaccctcgtcggcggcctggtggtgtgtgtcgggacacactcagttgattttatcaaccgtatcctgttcaccggtaaaattatcttcctgatcatcatgctcgccgtcatgatgccgcatgtgaatatgaccaaccttgtcagcatgccgattcagaacggactggtgctttccgctatcccgctggtgtttacctcttttggtttccacggcagtgtgccgagcctggtgaattacatgaacggcgacagcaaaaagctgcgctttattttcctcaccggtagtgctattccgctggtggcgtatctgctgtggcaggttgcgaccctcggcgcgatcccgtccgataccttctttggtattctggcgcagaaatccggcctggacggcttactgacggcgctcagtgagaccgtggccaataaatacgtggacatcgcggtcagcctgtttatggatctggcactggctacctcattcctgggtgtggcgctggggttatttgattacctggctgacctgttccgccgcaaaaacaccgctttcggccgtacacaaaccgggattctgacctttgccctgccgctgatttgcgccctgtactacaaaagcttcaccggcgcactggcgtatgccgcaatggcgctctccttcctggcgctgatcctgccgtcattattaacatggaaagtacggcagaacccgaaagccggtgcttaccgtgttgcaggcggaaacggggttctgatctttatcttcctgttcggcctgctggtgatctccatcgagttcatcaaaagcgccggttatctgccgaatatttaatctctttttctgaaaataagcccggaaacccgggcttgtttttttatcagtgtgcggcattcagccgtgcaaatccggcagttaaatctgcaatcaaatcctcagtgtcttccagcccgatttgcaggcgcagtgtcagcccgcccggttgccagtcagtgaccgtccggtaacgactgcagtcaaacggcactatcaggctctcaaacccgccccaggaataacccattgcgaaaatatccagcccgtcgagcatcgccgccaggtcgtctgtggtgtatttcgcattcagaaccaccgagaacaaaccggaagaaccagtgaaatcccgcttccagatctcatgccccggacattccgggaaggccggatgcagcactttgctgatctccgggcgggactgcagccactccgcgactttcagcgcccggtgctgtgcttctttcaggcggatatgaagagtgcgcagaccacgcagcaccagaaaacaatcttcggcccccggcagcatcgccatctgatcataggttttgcgcagttccggccaccactgtgcattggcggaaaccagccccatcagtacatctgagtgaccgccggggtatttggtaccggcttccagggagatatcacagccgtgttcatgggcgcggaaaaagagcggggtcgcccaggtgttatcaataacggttgtcacatgatggcgtttcgccacggcggtgatcgccggaacatcctgcacctcgaacgtctgggagccgggggattcaagaaaaatcacggttgtttccgggcggatcagcgattcaatccccgcgccaatcagcggatcataataggtggtggtaatgcccatttttgccagcagaccgccgcataactgccgcgtcgggtgataaacggaatctgtcatcagcagatgatcaccgcttttcagggtggtcagcagcgccagtgtcaccgcgcccaatccgctgggggatacccccgtacccgccgcaccggtcagttcactccaggcattctccagtgccgcgatcgtcggagtgccgtcagtgccgtaatgaaattcagcacggcggttgatcagggcatcatacgtcgggaagaccaccgtcgagccgcggtataccggggtattcacaaatccgtgctgtaatgcggggttacggccgctctgcgtcagccgggtttctgtccgcaaaggacggcgtgtatgttctgacataatcacctcaataatagtctgcctggttatgctgttatcctgccataagcgcggcggctttccttagtcgcttttcagctaagatatgccgttatcctcacctgccgtggtgtaaagaaatatttggcaattttgctgcatcactattattaataagttacgaaaccttatattatcaacagattaattttcacatgacggaaaggatatggaatcagaagaaatcagggaccgacgtccgattaaagcccggcagacccgctgggcgacctcagccgcccgtctgctgcaacagcgcggcgcaacccctaacggtatctctgtcgccagttcagtctgtgcattatttgccgctgccgccttttacggcgccctgaactgtgagataacggcacttcgcatcatcctgtttttgctggccgcactgatggtacagggacggcttatctgtaatctgctcgatggcatggtggcggtcgaaggcggcctgcgcagccctgttggtgccgtatttaatgatttaccggaccgagtttcggacagcctgatccttatcggtgccggttacgggctggccggttttgtcacttatgccccgcagctcggctgggcggcggcgttgatggcagtaatgaccgcctatgtccgggtactcggcggcagttgtgagcagccgcagaaattttccggcccgatggccaaacagcaccggatggcgctgctgaccgccggggccgttgccgcctgttttctcccgctgtatcaggctcagtggctgtttcttatcatactgtgggtgattaccctcggcgcactctggaccaccgtgcgccgtacccgcatactgatggctgatttacgtaaggataataaaggatgacccgtaaaacgttttcgccggatcaaaaaattgtctcggcgctgctggtgtcagtatgccggtttctgaccgggatccgcgcaaagcagaacgccccgctgccggaaggtaaaccctgtatttactatgccaaccattccagtcaccttgacggactggtgatttggtcctgcctgaccggtgcggcgcgaaaacgcgttcacccggtggcggcgcaggattactgggataaaaccgggttccgtcgttatattgccaaacgtatttttggtgcggtgctgatcgcacgcggtaaaaaaatcgagccggcaacagaggatgaacaacaggaggccacgccggcggagaatccgctggatgtgatgcagaatgttctcgataccggggattctctgattctgtttccggaaggcacacgcggcgacggtgaaaagattcaggatttcaaagccgggctctggcatttatcccgtaataatccggatgcggtgctggtgccggtctatctggaaaacctcaaccgcgtcctgccgaaaggctcgcggctggttgtgccgattatctgcactgccacattcggcgctccggttgaaccggccggggaagaagagagcaaagcggactttttagtgcggacccgccaggcgttagaggcaatacatcatgaaagataatgaattattctggatcttcagcgggctgttcgggttcctggcggtggcaacggttatcggcctgatcctgaagcaggttaagggaaatacctcggttatcagtaacctgaatgcccgtatccgtgcctggtggctgatgtgtattatcgctgctgtggctatcagcatcgggcctatcggctctgtggtgctgtttgcctttatgtccctgctggcactgcgtgagcttatcaccctgacgccgacacaccgcgccgaccacggtgccctgttctggtgtttctttatcatcctgccggtgcagtatgtgctggtcggtgttcagtggtataacctgctggcggtctttatccccgtctatgcgttcctgtttatcccgacccgcatggtgctctccggcgacacccgccacttcctggagcgcatggcaaaaatccagtggagtgtgatgattgcggtttactgcctcagttatgcccctgcactgctggtactgccgattccggatttcacggataatatcaacctgctgctgtttctgatgatcgtggttcagatttctgacgtgctgcaatatgtgttcggtaaactgttcggcaaacgcccgattgtgccgaaactcagcccgaacaaaaccgttgaaggctttatcggcgggatcctcagtgcgagctgtgtcggtatggcactgtggtgggccacaccgttcagcccgtgggcggcattcctgctctcactgttgatttgcctggccggtttcgcaggcggattgtgtatgtccgccatcaaacgggacagcgggatcaaagatttcggtgccatgattgagggccacggcggcatgatggacagactggattccctctgcttcgcagccccggttttcttccatgtgctgaaatatttttatacctgatgacaaaaagccggtgtggcgattcatccgccacaccggttacccgcacgattctgatacgccgtcatccagttgaccgcaaaatccaggatctcccgcgcactgaccagtaatgtcgccgcactgccaacgtttccctgccgcacgttgttattctgcagacaaaaatccgcgacaatctgtgcaaaatagccttcagggaaacagtcacataccggatccaccgtatcaaactcctcactcatcacccactccgtactgccgtctgcccggagaaacggtaactctctgcggcggatgcgtttattcctcagtggtgcaatactttccgcatgatgcagcagactcatggtgtccgccggggcacccggcatcagaaccttaccgttctctgccgccagccgtgcaaacggagaatcctcaccatagccgtaacacagcggatgattttccgtaaaacaggctgcttttgccccgatcgccgcgacagaggcgccgggattcgcactgcgcagcgcgcccagccgggtacggaaacattcggcaaacacaccatgatccggatttgcccgcgatgtccggacatcaaacggcataatcagcggtttcagtgctgccgggacacacccgtcattccccgtacaatcttcataattttccagccagctgacataacacagcagagtgcctttctcacctgtacactgcagcagggcatcaataagatcatccgcgccgttgaggcaaggcccggcagcacgcagagaaacatgcaccatcacggaatctcccggctgcaaaccgagttcccgcagttgttctgccagcaccggctgtgaccagtaaaattcatcaccaacggcaatcattttttgcatttcagtaccttatatttatagtattgattcggatatctgctgtttttattatttaagggaataacatgactcaggaaattctgctgatccgccacggtgaaccggtgccggacaaaaaaacaccgctggccctgcgcaacctccgtgcctggctggcagaatatgatgcgggcggaattatcccgccggccgctccgccgttatcgctgtccgcagaagaattgtcccgttatttcccggtagccagtccgctgttccgcaccacggcatccctggatgttatcgggatcactccccgcgccattgttgatgaactgcatgaagcagtacttcccctgttctctcctgcactgctgatgccggtaaaactaccgccgatgtggtgggtaaccgcattccgcctgctgtggctggcgggtggcggaaaatctgtgccctctgtggcacaggtacgcagacgggcacaatgcgccgcgcaaatcctctccggctatgcgcaggaacatggcgctgtactggtcatggcgcaccggattatcaatcacgccctgcgccccgcactcgaacaatccggctggcggatgacagaaaaaacacataacaactactggggaatgatgcggttcacccgtgacgcaccacaccgctaatgtcagccggtgtattctgtgccgtatttccccgccggatattaaggcgcgattaatctgtataaatcattacgccctgccgcacgttccgccacatccgctctgttttgctcactttcccgtataagactctgcctgctttgttccgcaggctgatcatctgctgctgccttgcttaattttaaatagttattgccattaaatgaatatttatgtatttttaattaaaaatcacgcataaaaatgaggttgtcatgtttaaaaaattagtctttgcaggctgtttatcattattagcattcaccggggtaagccaggccaaagaaacctatgtggtcggtgcaggcggtacctatcgcccgtttgaatttgaaaacagtgaaaaacaactcgaagggtttgatatcgatattatcaaagcggttgctgccgccgaagattttgacgtcaaattaatcaacacgccgtgggaaggtattttcgccacactgtccgccggggatcgcgatattttaatttccggtattaccatcaccgataaacgcaaacagatggtggatttctccgccccgtatttcccggcagaacaggcaattgtggtgaatgaaaattcaccaatcagcgcattatctgaactgagtaaatataatgtcggcgtggtgaactccagtaccggggatattgtggtctctgatgtgctcggcaaaaccagcaccgccatcaaacgctttgataatactccgctgctgttacaggaattatatgaagacggcgtggatgcggcagtcggcgatgtcggtgtggtgaagttttatattaaaacccatccggataagaaatttaaactgatttacgacaatcattttgaaaaacagtatttcggcattgcggtcgccaaaggtaatacggaattacaggaaaaaattaaccgtggtctggcaaaaattattgccgacggtacttacgccaaaatctatcagaaatggttcgataacgacgtaccttccctgcccgcgcagtaattcattatttatctgattaaaaacccgctcctgcggcgggtttgatctgttttttcaggatggatgttatgtcagctttccgctgggaaattatagaagaatacgctccgttatttatggacggggcactgatgacaataaaatgtaccattatctgcgtcatcctggggaccctctggggactgacactcggccttggccggacagcccgtgccgaacgcggcccggcaaaatggctgctgctgttctttgtgcagtatccggtgcggttttatgtcagtgcattccgtggtacgccgctgtttgtgcagattatggtggttcacttcgcactggtgccgctgtttatcaacccgcgtgacggcctgatggtcaccagcggtattatcagctcagacacggccagaatgctgcgttctgaatacggtgcatttctctcctgtattgttgctatcacactcaatgccggggcgtatgtttccgagattttccgcgccgggatccagtccgtcgaccgcggtcagacagaagcctcccgcgcactgggcatgagctggggaaaaaccatgcgcaaggtgatcctgccgcaggctttccgccgtattctaccgccgctgggtaacaatgcgatcgcgattgtcaaagattcctccctggcctctgctatcggccttgccgacctggcttacgcggcacggacagtgtccggtgcgtatgcaacttactgggagccgtacctggtcatctccgttatttactggatgctgacattcctgctggcgcagctggttcaatacaccgaaagaaggttgagcagaagtgattcacgttaataatttacagaaaaaattcggcaatactcatgtgctgcgcggtatcagctgtgatatccgtccgcaggaagttgtctgtgtgatagggccgtccggctcagggaaaagtacctttctgcgttgcctgaatgccctggaacgcccggattccggtgagattgtggtaaacggcaccgatgtgtgtgatccgaaaacagatctgaacaaaatgcgcgaacataccggtatggtattccagcgcttcaacctgtttccgcacatgacggtgctggataacattaccatggcgccgctgatggtgtccgggctgaaaaaagctgatgcgctgcttaaagcggagcggttactggaaaaagtcgggctgccggataaaattgatgcctggccggaaagtttatccggcggtcagcagcagcgcgtggccattgcccgtgccctggcgatggatccgacggtgctgctgttcgatgaaccgacttccgcgctcgacccggagctggtcggcgaagtactgaatgtgatgaaagcgctggcccatgagggtatgacgatggtgattgtgacccatgagatgaattttgcccgtgaagtggcagatcgcgtcttttttatcgaccaggggatcattcaggagtccggcacgccggagcagatttttaatcatccgcagaacccgcgtaccgccgcgtttctcagccgcgtgctgtaatttttgctgcagtgaatagtgaataaggacagagacagacagcctctgtccttttctgtttatgcggttaactcactgtgtgtaaaaacaaatttgttcacatcatataacccgagactggtgagtttcagtgtcgggatcaccggcagcgacaggaatgccatctgaataaacggctcatccagcatcaccccgcaatcgcggcaggccgccttcagtgactcaatttcagcggcgatttcatccgccgttttatcactcatcagtccggcaatcggcagtgtcgcatggctcagcacccggccgtccgcaaccacacacatcccgccgccaccggcaatcagctgattcaccgccagcgccatatccatcggatcaataccggcgacaacaatattatggctgtcgtggctgaccgttgacgccagggccccgcgcgtcaggccgaaattgtgcagcaatgccgttgccggtggtgtctggcggccatagcgctcaatcaccgcaagcgagcagatattatcgcagtcatagcggcgtccgtcccagctgacccgctgctcacaggtgatcagttcattcgggatcacactgatagcgcggtactcatgaccggcaaccggcacaaaagcaagagattgtgctgtcacggcctgacggcggacagtattctgcattggcggacgtgatgctgcctgtttagcctcccgctcacgcagcagcaccgctttatccacccagcgcccgccgcacataaccgcctgaatatcgactgttttctcgtcacgcagcagaaccagatccgcctgtttacccgacgccaccagcccgagatttttcagcccgaaatgccgggcggcagaccagctggcaacacggtaagcaatatgtaccggaatctgatgctgattgatcagacgatacaccagcgcattcatatgcccctcgtgaatgatttcccacggattgcgatcatcggtgcataacagacactgcgggctgctcatcgcggtgataagcggtgccagtgcatccagattccgtgccgccgacccttcgcggatcatcagcgccattcccagcgccagtttttccagcccttcctcataacggtgtgattcgtggcagttttcaatccccccggcaatatagccgttgaggtctttcccggtaaccatcgggcagtgaccatccagcgtcatatcgcggaatgcatccagtttatccagcgtttctgcctcaccggcaatcaccgccgggaaattcatcatctccgccagtcccagcacatggggatgatccttgtatttcagcatctctgccagcgggaaatccgcgccgttcacatcactgcccggtaatgccggtacacaggaactcacctgaacaaactgattctgctgtgcctgttccgcgcagcgcagaaaccactcaataccctcttcgcccatgacgttcacgatttcatgcggatcacacacaatggtcgtgactcccagcggcagcgtggcactctcaaaggtgaccggggtcatcatgccggattcaatatgcaggtgtgcatcaataaacccgggtacgaccaccgcgtttttaccgtcgatgacctgatgcgccggtgcatccttatacaccgcgccgacaccggcaatcgcattcccgcttatcaccaccgggcccggaaattccccgccgttaatcagatccagaatccggacattatcaatacgataatccgccggtgcctcactgcgggccacggcgaggagtgttgtcatttcttcacggctgcgcgtgcaggtgcgcttatttttctcactgttcatcactgtcccctgtttttctctcacattgataatgcgaattcgcggtgttctctctgtcctgtgaggtgtaccggaataaaggtgatccccgccgcaattgttacaaattattgcgacacaaccggatgattacggtttctcacggaatgtcattacgatgctggcattgattatgcatttatcagaccagttatcttttccccgggagacaggagcataaaatggatagtcaaacaccggaaaccatccgggaaacaggtgtactgggacgtttattccgtttacaggcacacggtaccactgcacgaaccgaagttatcgccggtataaccaccttccttaccatggtgtatatcatttttgttaacccgcaaatcctcggcgctgccgggatggatacacaggctgtcttcgtcaccacctgtctgattgcggcattcggctgtattctgatgggctgtctggcaaatctgccggtcgcactggctccggcaatggggctgaacgccttttttgctttcggtgtggtcagcgccatgggttactcctggcaaatcgggatgggggctatcttctggggtgcactcggcatgctgctgctgaccgtgttccgcatccgttactggatgattgccaatatcccgctgagtctgcgggtggggatcaccagtggtatcgggctgtttatcgctatgatggggctgaaaaatatcggtctggttgtggcgaacccggccacgctggtctccatgggggatctgacctctcactccgtctggctcggcgcactgggcttttttattatcacgattctggcatcccgacgtattcacgcagcggtgctgatctccattgtggttaccacactgattggctggtggctgggggatgtcacctataacggtattttctccatgccgccggatgttaccagcgtgctgggtaaagtggatgtggccggtgcctttaatatcggtctgtcagggattattttctcgtttatgctggttaacctgtttgactcatcgggtactcttatcggggtaaccgataaagccggactggcagataaagacggtaaattcccgaatatgcagaaagccttgtatgtggacagtgtcagctccgtgatcggcgggtttatcggcacatcatctgtcaccgcgtatattgaaagtacctcgggggtttctgtcggcggccggaccgggcttaccgccgtggtggtcgggctgctgttcctgctggtgattttcctctccccgctggccggtatggtgcctgcctatgcggttgccggtgcgctgatttatgtcggggtgctgatgacgtccagtctggcacgggtaaactggaatgacctgactgacgcggtacctgcctttatcaccgcgattatgatgccgttcagtttctccattacagacggtattgcgcttggttttatctcttactctgtgatgaagctggggaccgggcgctggaaagagctgaatccgtgtgtgattctggttgccctgctgtttgtgctgaaatttgtgtttgtcgaccactgatgtatctgccggatggcgggtttcccgtcatccgggtattattttgttttctctttcaggcgatgatgcagcgccttaaacggaatagccaggccgagcgtcaggaaaataagaaacacaaaccctatattgacataatcttctttactgttttcagtcaccggttccggctcagccgccgccggttccccttcctcattaatcccgaaatccccgtggtgataatccgccagaatctcctgtgctctggttaactcatcctgattaaccagcagcttcacaccaccgacagcctgagcatacatctggttattccagacaatattttcatccagcagcatcacctcaatcccttcggattccagcaatccggcttcaatcctggcatccagcggcgacagatactgagccagtaatgcatagcggctgcgtgtcgggtgtatattccacataatacctccttcggttggctgtcctgactgaatgccccggattcctgccggtgtcagtgcgtaatagctgaaaggatcagcgataatttccgggaaaacaacctgaatttcgcctttctgcaacaggagtaagtttaatgatcagttccgctataacactttaaaccgttctaagcctgtcgcgtgatataaaaaaacatcaataacttccctttatgatactgacaacataaattccttatgaaagatattaatgatgaattatttgattaataaaatatgaagaacactatttttacagccattgtattcccgtgaaatatcctttagcatttagtgctgaaaaaacttaatcctattccgaatattgatctttgacctgatgctgaaaaaatataaatacccgctgttatttgttgctgtcatgctgctgagttatctcaccaatacattcttgtatcagcgtgattcaaccggcccgcatttagccaccctgtttttggttttatgtaccgttattcttctgaactgtaaacactggctgcctgccgttgcaggatttattattacactgattttttcactggaagtcggttatttcaccgaattccacgaacgaatttctgcaggtgttctcgattcagcactggaaacaaataattctgaagcaacactgatgctggggcactatttatattctatcatattgcctgccctgtgcataagcgtattaatttttatctgcttccggagaaaaagactcagccttccccgctggtttacattatcaccggtgttcattttcggctttctgatgatttccctgctccgtgaagtcatcccggaataccgtaatttatccattaatttcagcgaagacccttatgaactggggacgtatctccgcgagaaatttcctattgtcgccggaaatattatgtatgtttcctccgttgctctcagccatgataagtatacggagaattatcctgaccggaaaccgaaccgggtgctggcgtctgccggaaaaccacagaataaactcatcatctttatcatcggggaatcatcatctccgtccagatatcatatctacgggtattccaaagaaacaacaccggaaatggaacgcatttttcagggtgacaaggcctgcgtgacggacaaagtgcattcatcctccccgataacacgggattccatttcattgtcactttcattttacacaccggaaagcgaagaaaatttattccgtcagaaatcggttattgaaatagcacaggatcagggatacaaaacttactggctgggcgctcagtctctggtcggcgttaacggttcaaaatatggctatcttgcccggcggaataatactgttattgtggaagaaaataatgacatgaaactgcctgagttattaaagcaggcgctggccgagcctgatgaatacaaatttattattctgcatttatggggcaaccacatgccttatacaaactatacagaaacagaaaagcagcagctgaatgacgccggtgactatgatctgaccattcgtcacaccgataatgtgattggccgtctttatgatgaagttgaatcagtaaccgatgactatattttcatctatacctccgatcacggagaaattgtcggtaaaggccacggtttttccaaaggcgcggatcaattcctgattccgtttttatataaatcagggaatccgtcttatggctgtgaatttattgaaaaataccgcaatcaggatggctggatcagcggattaatgaacaaatatattttatctgaactgcttggttattcattagaccagtcgattgcggaaccggataaacagcatgatcggatcctttcaactgacggttatgcgattccgttttcatcttatttcaacaagaataagtaagcagccgcatactgttcagttataaaataccgggcaaaccggacgcagtataccggtctgtcacttccggtatgctgtccccgccattaaagattgacaggacagaacggaaatggtttatttcgttgcaggcatcatttttacatcagtatcagacatataaaaatcctgtgactgaataaccagcaatatgctaagagtcaattatatgagcagcaacgctttagtctcggtcatcattccggcatacaatgctgaaaaattcatcggccgcgctctggacagtgtgataaaacagacctggccggcagtcgaaatagtcattattgatgatggttcatcagataataccgctgccgtctgccgggagtatatgagcagtcatgatcacatccggtatatccgaaaacaaaacggcggcgtttcatccgcacgtaatgaaggtattaaagcggcctccggatgctatatctgctttctggacagcgatgacacttatgaaccggactttatccggacactggtgagtaaagtcacacaggatgaccgggatttcgcctactgtttattcagaaaaatacattccgacggccatattacacagtcagtatgctatgacaacacagataccgttattaccgactttctgaactttgattattttgatatctgctgtttaatgctgaaaaaagagtttttggataagaataatttattttttgattcatccatggttgtgggtgaagatgttttatttatccttgaatgtctgaacaagggcaccttttcctatattaaagagtatttatataattatatttatcacagtgaatcactgatgaataaaaaatggaagaaggcagattacatcagtgacctggatgcctggaaaaaaattctttcttacatcgctgagacgtataataaaccggataaatcatccgttttcagcaaagtccgcgctaaagtattgagcctgcagattcagtttatgtggaacatgctggccaccggcctttacccggatttaaagttttatatcaaagacttcagctaccataaatctgattttgcattaatcagaaaagcgggaaaaaataaattccgtctgaatattgtattatccggtaatgttttcgtgtggcgtatagcacgtagattgctgacaaagaaaaaaaatatcatccctgccggttaggtatatataacagggagtgtcagattataatatcagctgaacattccctgtttccttgcatgaacctgttatgacagctcctgtcagattaatccgtaaaaatctttttatcttccctttgcccgcattcttttttttcattctgtttttgtttaatcagagtacctgatactacgcctgtttttcgtaaacatcctaaattatcactgtgactcttgtgttacagtcgccacacggtaaatatacagggaaccgtatttccatgaagaattggatatttttagcctggatgctgagttttccgtttacatcctatgcttatacaaatacagaacttgccccgaaagatcaggctatgtcgtatgttattaaatactccggcagcaaaacggatgaggggaaggaaaaagcgctggatcagtttgataccctgatccgtcagtaccctgatgatattgcactgcgcgagctctacagcgatttactgattgtggacagccgttatgaaaaagcgatcacacaactgaaaatcgtttatcagaataccggtgttccgtcgctgaaactgatggagtgcatgttaaccgaacgcattaaattgcctcataatatgtgttaccgggatgtcatttctgtatttgagcaaagtaatgtccgggattttaattatcttctggcactgtatctgggtgaatcccctgactttgagagacacaaagcccgctggctggaaactcacacattatcggaagaacagaaaaaggttattgctctgcaaccgcgtatgctggtcaatgcctattacccttaatattacccggcgcaggtgatacccgcgtaataatacgcagcaaattgtgactattctgcccggggaaataaaaacaggagtgttatcatgccgtttttacataaaagaatgcacctgacagcaggtgatacggtggtggtggattgcggtcgtccgtgcaatgttttaatgatgaccaaaatgaattttaatcagtaccgcaaaggcatgccgttccggacacatggcggcagtggtttcttccatgagcttccggccagaatggtggtaccgtttgatgcggactggaatattaccctggatattgaggaaggggcactgacggttgagcattccattaccgtcgagccgcgcgctgataaggcgattgccaaaaaataacccgcggttccgtcagcggaataatatcagtccgggaaattccccgcagataacaggcactgcggggatcgttttatattgccagtaatttatccagccctgccgttttcactgagccatgtgaaataaaacagagctgataccagagagaaccactttctgactgtagtttttccgtataaaacgcattggctgataatgcgcggataagcaatcctgtccggtaaagcatgactgccataataatggcggataatcccgcaaacagggtggtcaggctgacgatatccgtatctgtccggatatactgaaccagtaacagcacaataaaacccagttgagtgatacctttcagtaacagcaggcggaagaaaaaatccttcatattttgttcaagtgcaaaacacggattttttaaaattgcccgctcttctttcaccggtatgctgtaaacatacactatccagtggctgatatcatggctgcgggaaaccagccccttctcttttaatgtatgtaaccggagagaaaccaccagctgccagacaattccgtgaaataacaaataaagcagaaatgcattcatgccccaaaaaccggtgagcaccgcgagtaatataaaaaaggcaactcttcctgaatagatccaaaaaggaacaacctggtaattcatcgtcgttccctgtgtttttttgtccataaataccattccgcaataaaaaatacccctgtgatatatcaccagtataaccggaaaatccccaaaatatactattctgacccgttaccgccgggttgggtcttcttattaatgttactgcaaaaaatgtccttttctgatgtttcgtaaaccagcgtgacattattttcacccataaaaaaactaatgcgaaacaatagcatgaagactatatttcacaccaactccatgaatttaacggaaaatttcgcgttactcgttctgagaaatgtgtcacactattcgcttacagcaccatttttgaatgaataaaaataatggttattttttagcttaacggatttgtttatggacgaaaaaacgcctgccacgtcgccacgcggcgaactcaaacgcagtttaaccaaccggcatattcagctgatttccatcagcggggcaatcggcaccgggttatttatgggctccggtaaaacgatttcactggcaggcccttcggtattatttgtctatatgatcatcgggtttgtcttattctttgtcatgcgggcaatgggcgagatcctgctgtcaaacctgaattataaatcgttcagtgattttgccggggatctgattggcccgtgggccggtttttttgtcggctggacatactggttctgctgggtaataaccggtattgccgatgtggtggccattaccggctatatcatgcactgggcacctgattttccgcgctgggtcagctcgctgctctgtattttgctgttactgtccctgaacctggcaacggttaaattattcggcgagatggaattctggttttccatgataaaaattgtcgcaattgtcgcgctgattattatcggcggcattcttatcggcacacattttgtttcaccggaaggacatgaggcggcgttatccaatatctggtccgacggaggtatgttcccgaaagggataatcggattctttgccgggttccagatagcgatttttgcctttgtcggtatcgaactggtgggtactgccgcagcggaaacccgtgacccggtgaaatccctgccgcgtgccattaatgctattccgttccggattattgcattttatgtgctggcgctgattattattatgtctgtcacgccgtggcgctccattccggcagataaaagtccgttcgtggaactgtttgttatgatcggcgttccggcggcagcgagtctggtgaactttgtggtgctgacagctgctgcatcctccgcaaacagcggtgtgttttccaccagccggatgctgttcgggttagccaaacaaggcagcgcaccaaaacaattctgccgtctgtcaaagcaggctgtaccggccaccgggctgattttcacctgcatctgtttgtctgtcggggtgattctgctctactttatccctgatgtgatgcatgtgtttaccctggtaacaacagtatccgctatcctgtttatgtttatctggagcatgatcctgtacagctacattatgttccgccgccgtcgtccggaactgcatgccgcatcggtctataaagtgccgttcggcagctggatcccgtgggtgtgtctgtctttctttgtctttgtgattgtattgctgacactggagaccgatacccgtcaggcgctgcttgccacgccgttatggttcatcctgctggcagtcggttaccggaatgtcagaaagcaccgccttgcacaggcacaaaagtaacggacaaaaaaatcccggcaacgccgggatttttgtttttatactctgttactcagtccgtccgaggtaacggtcttccgcctcagcaaaacgtccctgaactgatttgtccggctcacggcctgccaggctgaccaccacaatcgcaatacccgccagaataaagcccggaataatttcatataaattaaaccacttatattctatccagataagaaccgtcaccgcaccggtaaacatccccgccagtgcgccgttacgggtcatccgcttccagataacagagaacaggataaccggcccgaatgctgcgccgaacccggcccatgcgttactgaccagccccagcactttgttatttttatccatcgcaatgtagatagcgatcgccgcaatcaccagcaccataatgcgcccgaccagcaccatctctttctgtgaggcattcttacggaaaaacggtttgtagatatcttccgtcagggcactggcactgaccagcaactgacagctcagggtactcatgaccgctgccaggatggcggagagcagaataccggcaatccacggattaaataagatagaagtcaggctcatgaaaatccgctcgcggttttcagtcaccgagcccgccagttccgggttctgctggaagaaggcaataccgaagaaaccgacacaaatggttcccgcaaggcagaggatcatccaggtcatactgatacggcgtgcactgcggatggtgtgatgagaatccgccgccataaagcgcgccaggatatgcggttgcccgaaatagcccagtccccagcccagcagagagataatcgcaacaatatccagcccgcggaacatatccacatacgccgggctttttgcttcgataattgccagtgcagtatcaaacccgccgacagacacaatcaccataaccggtgtcaggatcagggcgaaaatcatcagtgtcgcctgcacggtatctgtccagcttaccgccaagaacccgccgaggaaggtataggcaatagttgcccccgccccgagccacatggctttttcataactgataccgaaggtgctttcaaacagcagaccaccggccacgatgccggaagcacagtaaatggtgaagaaaatcaggatcacggctgcagatacaatccgcagaacacggcttttatcctcaaaacgctgcgtgaagtaatccggcagcgtcagcgcatggttgacttccgtctgaaggcgcagacgaccggcaacaatccgccagttaagccaggcaccgatacacagaccgatggcaatccaggattcggaaataccggagaagaaaaccacacccggtaatcccatcagcagccagccgctcatgtcggatgcaccggcggataatgcagtcacaaaactgcccatccggcggccaccgagaatatagtcgtcgaagttattggtggagcggtaggccatatagccgatgaacagcatcccggcgatgtagacaataaatgtcacaatcagcggtgtggtcagcgtcattgtcataattaagttcctgtactgaatttatagtccgtcacgtatcagcattgcgtgtaccaatcgctgtacaggatgcgcgtcacaccggtgttactgtgttgcacatcgcctcagccatccctggtctgcacagacaatgccccgtcaattatcattatttgttaaatctgtgatgagttgtgttcagcccgatagtaacgacaacaacaataaaacaacaattaattaacgatactaaagtgaagatttgtgatttttatcacgggatatgtcatcagaaagtgatgcggttaatcacctgatttaatcattatacgccttaaaaccagcaatatactattgttatataatgattttattttaaccaatacagtttatttcttaatcgttttctcagatcagtataaaacagcgacattattcacactttgcacatctctttatttaacaatgttgcacaaagctgcaacctcatggatattaatgtgcaacgcatgacctgttgccgtttatgaggagtgaacatggtgagtaccacaatgggcgtcagactggatgatgaaacccgtgagcggatcaaagccgcagcgcaaaaaattgaccgcacgccgcactggctgatcagacaggctatttttgattacctggctcagctcgattctctgccggacggcacactgcctgctgccggaacaccttccgcacaggaagatgaaaccgtaccggctgagccgccggtcagctgccagccgtttctggaatttgccggtgatatcctgccgcaatccgtgacccgcgcagctatcacatccgcataccgcattccggagccggaagcggtcgctatgctgctgccgcaggcgcaactctccccggatgccgcacaggccacccataaactggcttacggtctggcagaaaagctgcggaatcagaaaaacagcagcggacgtgccggactggtacagggactgcttcaggaattctccctctcctcccaggaggggatcgcgctgatgtgcctggcggaagcactgctgcgtattccggataaagccacccgcgatgtgctgatccgcgataaaatcagccacggtgactggaactctcacctcggccagagcaaatccatgtttgtcaatgccgccacctggggactgctgttcaccggtaagctggttgccacacataatgaagcgggactgagccgctcactgaaccgcatcctcggcaaaagcggtgaaccgctggtacgcaaaggtgtggatatggcaatgcgcctgatgggcgagcagtttgttaccggtgaaaccatcgcccgtgcgctggcaaatgcccgcaaaaatgaagccaaaggcttccgctattcttacgatatgctgggcgaggccgcactgacagccgcagatgcacaggcctatctggtctcttatcagcaggctatccacgccatcggcaaagcctccgccggacgcggtatttatgaagggccgggtatctccatcaaactctccgccctgcacccgcgctacagccgcgcgcagtatgaccgtgtgatgtccgaactttatccgatcctgcgcgatctggtggtgatggcgcgtcagtacgatatcggtatcaatattgatgcggaagaagctgaccgtctggaaatctccctcgatttactggaaaaactctgttttgacccgcaactggcgggctggaacggtatcggttttgttatccaggcctatcagaaacgctgcccggtcgtggtggattacctgattgatctggcatcgcgcagtcagcgccgtctgatgatccgtctggtgaaaggcgcttactgggacagcgaagtcaaacgcgcccaggtcgacgggctggagggttatccggtgtatacacgtaaggtttatacggatatctcttacctcgcctgtgcccgcaaactgctgtcagtaccgaatctgatttatccgcagttcgccacccacaatgcccacaccttatccgcaatttatcagctggcgggcaataactattatcccggtcagtatgagttccagtgcctgcacggcatgggtgaaccgctgtatgagcaggtggtcggcaaagtagcagacggcaaactgaacaggccgtgccgcgtgtatgcaccggtcggcacccatgaaaccctgctggcttatctggtccgccgcctgctggaaaacggcgcaaatacctcctttgtcaaccggatcgccgatggcactattccgctggagatgctggtggaagacccggttgcggcagttcaggcaatggcagccaaagaaggtgctgtcggcctgccgcatccgaaaatcccgctaccgcgcaatctgtacggcaatacgcgggtcaatgctgccggtctggatctgagtaacgagcatcgtctggcgtcactgtcgagtgccctgctcagtcacgccggggataatctgctcagtgagccgctcaccggcggaacatttacgccgtccgcaccggcagagctgcagccggtcagaaacccggcgaatcatcatgatattgtcggtcacgttcgtccggccacagaagatgaagtaaatcatgcccttgccaccgcatccggtgcagcagagatctggttcgccaccccggcacaggaacgggcggacattcttatccgtgccgcacagctgatggaagatcagttgcagccgctgctcgggatcctggtgcgggaagccggtaagacctttgccaacgcgattgccgaggtccgcgaagccgttgattttctcaattattatgcctctcaggtgaaaactcactttgccggtgatacgcaccgtccgctggggccggtggtctgtatcagcccgtggaacttcccgctggcaattttcaccggtcaggtagccgctgccctcgccgccggaaacccggtgctggcgaaaccggcggaacagaccccgctggtggcagccgttgccgtttcactgctccatgacgccggtgtcccgcgtgaggtgctgcaactgctgccgggtgacggcgaaacagtcggtaaccagctggtgtgtgatccgcgtgttcagggggtgatgtttaccggctccacagcggtcgcgaagattttacagcgcaatctggccgcccgcctcagtaccgaaggccgtgtgatcccgctgatcgccgaaaccggcggcctgaatgcgatggtcgtggattcctccgccctgacagaacaggtggtcaccgatgtggtcagttccgcctttgacagtgcggggcaacgctgttcagcgctgcgtctgctctgcatccaggaggatgtggctgatcgcaccatagagatgctgaaaggcgcgatggcggaatgccgtctcggcaacccggacatactggcaaccgatatcggcccggtgattgatgaagaggcacataacggcatccgccagcatattcagcagatgcgcggtaaaggcagaccggtgtatcagtcctccttcggaatggaaaccggctcaccggcgattcttaacggcacctttatcccgccgacgctgattgagctggatgatgtctctgaactgacacgggaaattttcggccctgtcctgcatgtggtccgctacccgcgtgacacgctgccggaactggcggagaaaattaatgccgccggttacgggctgacattcggtatccatacccgtatcgatgaaactatcgcacagcttacgcaacagattgaagccgggaatatttatgttaaccgcaacattgtcggtgcggtggtcggtgttcagccgttcggcggcgaagggctttccggcaccggtccgaaggcaggcggcccgctgtatctccaccgcctgctggcggaacagcctgatgattcggtggtcagtctcctggcggaacaggatgatctcaatccgccggatgtcactctgcggacacagttactggcaccgtttgatactttcctcgcctggctggaagcgcagcgccgccatgatgtgctgacagcggttatccgttacggcgagttatcacaggccggtacctgccgcctgctgccggggccgaccggggagcgcaacagttattatctgctgccgcgcggaatcattctcggcctgaatgattcagaacaggatgctttgctgcaactgggtgccacactggcagcgggctgccgtcagctctggcctgcggcggaacatacccgttcgctctataacgccctgccggacagcgtccgcgcgcaaatcacgctgacagaagagtggtcagcggatggtgtgatctttaacggtgtgattttccacggtgacagtgatcgcctgcaggcggtaaaccgggatgtggctgcacgcggtggtgaaattgtgccggttgccgggctcagtcacggtgatacacaaatcccgctgatgctgttactgcatgagcgtgcggtcagtgtgaataccgcagcggcgggcggaaacgccagcctgatgactatcggctgataatcacagagtcttaaaacggaaaaagggaacgagagttccctttgttttatcagtaaatgataaaaaatggtctgactgataaatcagtgtttgccctgccagtcaagatactgttcgtacttgcgcagtgcgatgttgtagttgctcagggcggagtcagataaatcttcactcagctgagcctggataatttcagtggagaattctgtggtggccgggaaggctttggaggacagcagttcatcgagacggcgcagacggacaacatattcgcgcacggtgctgtggctcatttccgtttcttcaaacagatactgtttgaatgccatgatatcgaaataatcggttgcactgttgcagtagatctcgctgcagaaacggcagagtgccacaaatttgtcctgcaatcccatccaggtggtgtcatcgatcatatctgtcatttcagaaatagcttctttattgatcagctgaccgttgaaaaccagggagatgcgatcgagggttttgtgacaatgactgcagtgagtctgactgtgtttgaagtctttaatgtaacggcttacgggccgtttcttttgttttgaaacagacatattctggcgccttgtgtagtctagtctaataaaaataaatcaaagataaagtcaaagttacttcatggattttaagcgcgcccgcagccttttgattgcctggctgtgtaactggctgacgcgggattcccccacttccagcactgcgcctatctccttgaggttcagctcttcctgatagtaaagagtcagaaccagtttttcacgttcaggcagttgttttatcgcctcaaccacctggtgacgcaaactctcgtctaccaacaaaccgagcgggttgcccccgtcatcatcatcacggacgggttcgcagctctcaccgtgaatttcgtgccactcatcgtatgaaaacagctggctgttattggtatcggttaagacctgacggtattctgcgatatccatctgtaacgaatcagcgatttcctgctctgtggctgcacgccccagagactgttcgagcgcgcgcacggctttggttatttcccgcgcctgacggcgcacactgcggggggcccaatctcttccccgcaattcatccagcattgccccgcggatccgttgtaccgcataggttgcaaaggtggcaccctgcatggcgtcaaaacgctccactgcatgcagcaagccgatacccccggcctgaattaagtcgtcaatatcaacgcttgccggtaatctcacctgcaacttcagggcttcgtgccggataaggggataataacgctcccacaggctatttttgttgataacaccttcggcggtatacaaatcactcacaacctgaaacacccttcgagattcatgaaaggcttttattatcgtgccctgaaaagaattcaatccggtgagtagtgaggtaaatcacgccttatttgccttatcctaaatcacctcattaacaaatagcaatactctctttcatttttatcataaattttgcaaaattccggttattttatatgacaaaaagaaaaataggcgttcattaatagaataaaaaaacaaatagttagaatattatttgttctgttatgggtaacacctataaaaaaaggtcagaatattctgaccttttaaatacgctaaagcaactacgtaaattaacgtaacaggctcagaacaccctgaggaacctggtttgcctgtgccagaacagcggtacccgcctgctgcaggatctgaccacggctcatgttagacacttctgttgcgaagtcagcgtcctggatacggctgcgtgctgcactcaggttgttaacagagttgttcaggttgttgatggtagactgcatacggttctggaatgcacccagttttgaacggtatgagtcaacagttttcagtgcttcgtccagttttttggtggttgcatcgttgactttgtcagcatctgctttggacttgatatcagtcagtttatcaccaacgaccaggttaccttgtgtcgctgtagttccgtctttttcgaaggttttcacttcaaaataatccgcacctttcttagcaacgatagtaccggttgctgtttcaaacagttcgtggcctttcagatcaacagtcgtaaatgttgcatctactttagcagcctctgctttttctgctgttgcatcaagcttagtatctgatttcagagcagtataagtcggcagttcgaaatctttcagacccagtttagccagatcaattttctgcatatccagttcaatgacttcaccgtcgtttgcaccaacctggaagttcattttagtgccctgctccagcactttaatgccgttgaactgagtttgttcagaaatacgtttgatttctgacaggcgctcgttcacttcttcctggatagaaccgatatcgctcttggagttagtaccgtttttcgcctgaacggtcagttcacggatacgctggatgttgtcgttgatttcgttaacagcaccttcagcagtctgtgcgatagagataccgtcgttagcgttacgggaagcctgtgccaggccttttacgttagcggtgaaacggttggcgattgcctggcctgcagcgtcatcttttgcgctgttgatgcgggcacctgaagacagacgctcaattgcagtgcctaatacgccctgtgaacggtttaagttgttctgagtaaccagagacagaacgttagtattgataacctgtgccatgatatatgtccttgttattgaaaataataaacagcgtttatctgtttggctttctgattttcgccagcaataacactatcggcaccctgagagaccactttaggttttttggtaaatatttttagaaaattgtcgcagaaatggtttcctcagacataaaaaaaagccggaacagtggttccggccaaaccataacacagaggaattgcctgatttataatgaaataatgattaacgcagtaagctcagtactgactgtggtacctggtttgcctgcgccagcactgatgtccctgcctgctgcagaatctgaccacgactcatattagaaacctcaacggcaaaatcggcatcctgaatacggctgcgtgcagcgctcagattgttaacagagttgttcaggttattaatggtggactgcatacggttctggaatgcacccagttggctgcgctgagtatccactttggccagggcatcatccagcgtcttcaggatttcatctgccggaggtttcgtacctgctgccagtaccttgatttcacggctggtatcaacactgacgttagcatgataatctgtaccggtagcatctttttccacaccggttacttttgcttcataagtaacatctttcgttccccctttaccgtcatctattttaccggtgaccaggtaggtatcttttattgcaacgccgttttcatctttggcttctttcagctctgtcggtgcggcagaccaggtcacacctgagaattcaaatgatgctgctttatttggcgttgaggcaccatcgtcaaattcatctgcagttttcgttgcaccttcctgacgatacacggcactcagtgtggagaaatccatacctttcagacccagcgcctcacggtcaactttcttcagatcaatatcgattgtttcaccatcattggtaccaacctggaaactcatttttttatcgccggataaaactttgatgccgttgaactgcgtttgttctgaaatacggtcaatctctgccaggcgctggtcaacttcttcttttatagagttgatatcgcttgccgagttagtgctgtttttggcctgcacacccagctcacgaatacgctggatgttatcgttgatttcattgatagcaccttccgttacctgcgccagtgaaataccgtcacttgcattacgggatgcctgggtcagacctttcacattggcggtaaagcggttggcaatcgcctgacctgcagcatcatcctttgcactgttaatacgggcgccggaagaaagacgttcaatggcagtccctaacacgccctgagaacgatttaaattattctgggtaaccagtgacagaacattggtattaataacttgtgccataacgatatttcctttttttgtatgaaataatgtgagttatttttgccgtcgctgcggagtaatactgttaacgggcgataattcactttatttacagacaaaaagtcgtcattttatcaatatcaggcacatttatccggataacgcattttgtgagttttgtaatcaaattgctgcccccgacgctcatttttgtttctttatcttaatggtgacaataaccctgctttccctgcgcaactctgcccatcattttttgccgttaacgctaaaattcttccgctgccaaccgataactatgtaaaaccaattaaattcaggagaagtacatggcaggcatagcatcgttaggcgtcggcgcaaatatggaccttaatcagcaaatggacatgctggaaaaagcagaaatgcgccgtctggagccgttaactgcccaaaaaacagcgtgtgaagcacagattagtgctttcggaaagttacagtcttcactggaaaaattaaaatccgcctctgaagcactgaaaaaatacggtgatatcagtaccaccaaagtcagtgaagaaaataaatactttggtgtgtccaccacaggtaaagcacagccgggtcagtatgatgtcagcatcgaacggctggctaaaaaccagaccttatccggaaaaggtgttgctgacggcaagacatcaatgggtaacagcaacgctgaacgaactgtttccattaaaatcggtgacggcagtgatgcgaaaaagaattttgatataaagctgagcagcgataaaacatcgccgattgaagtcgctgatgccataaataaagcagataaaggcgtctctgccagtgtggtaaaagataaacagggtgaataccacctggtgttaatcagtaaaacccaggggaccgattctgctatcagtatttctgttaccggcgatgatgatctggataaagccatcggcggaaaatcagaaaaacaaaccgacggcaccgttaaatttaccggtaatggcggcatgaagcagacgaccgcaccggaaaacgcactgttcactgtaaacggtatcgagcaggaatcacagactaacgaagtcaaagatgccttttttggtctgacactgacactgaaaaaaaccactgaaaaagacagcgccggaaaaccggttactgaacctctggttgtttcttctgatattgaaccggccaaaaagaaaatcaaagagtgggtggatgcttataacgagtatcagaaactctgtaaagatctgaccaaatataccaagacagaaaaaggtgaggcggcagataaaagtaatggtccgctgattggcgattccacggtacgcggtattcagaataccatccgcggacaaatcagaacaccgaatggtgacggtgcactcaacaccatgagcaaactcggtatcaagcaaaagttagacggtaccctggagattgatgacaaagttctggataaagcattaaaagaaaatggttccagtgtgaaagaattctttgccggtgacggaaaagagaccggttttgccactgaaaactttaattatctgaaaaagatattagacagccgtgaaggtacgattcataacgccaccgacggtctggagaaaaagaaaaaaggtatcgataaacgtatcgaacaaaccaataaacagatcgaaaacaccatggatctgtatcgccgtcagttccagaatctggacaaaatgatgaactccctgagtggcaccacacaagcactcggcagaatgttaggttaaaaataatgtatcagcgcaaggcaaatcaggcttatcagcaagttaatcttgaaagtgaaattaccaatgcctcgccttatcagttgatccggattttgtttaacggggcgctcagcgcccttcgccgcagcgaaatctttatggagcaaaatgatattgccgccaaaggtaaggaactgtcgaaagcgattaatattattgataatggcctgaaacaggctctggattatgatgccggcggtgagctggcacataatctggcctctctgtatgactatatgattatgcggttactcaacgcaaatatcgaaaataacgtgacctacgtaaaagaggtctatcaactgctctccgatctcgcggcaacatggcaacaaatcggggcaaatgtggatgaaagataatcaggtgagtattcaaacgaccatcaatttacacgatatatatcaacatgtactgacactgagtgaagaactcgttaccctggccagaaacagtgaatgggatgatttgattgcccgtgaaactgattatgtttgtgcagttgaacacctgacacagttatctcatgaactggaaaaagaacagccggtaaccggcgaactggtggaaatactgcaggctatcattgaaaatgaacgggtaacaaaaatttatttgcaggatcacctcaactttctgagtaaagaaataaaacagcttgaccaacaacgggtgattaataaaagttacgggcaattcactgacccggattattcgattcatgttaaaccagtagaataagtttttctgatcagcgcggtgtcttaaaataatgaaaaaatggcctgatctgttccggccggacagtcgttccctgcccggccggaacgttttgctattcagcggtattttttacaccgggtttcacacaatttcccagatataaccccaccataacagctgcaaatccgccgatcacactgaccagcaaataagttattccggtacccagtaacgccggggatgacattatttcaaatgtgccgtacacaaagctgctgaatgtggacaatccgcccataataccggttgccaccagcgcattgacatactgattaatccggttgcgctgtaataatgccgccgttattcccagcaggaatgaggcaataatattagccgccagaatatcaagcggaaatccgtcatgcagagacggcacaccaagcatcagtaattcacggcagattgcgccgaatgccccgccaataaaaataagaatcaccatattcatattgctatcctcatgccgccagccagacacccagtgcggcagcagccagacccgccacaacagagataagcaaataaccgaaagccagcatccgctgttttgaattcaccagttttgccgcatccagctgcatactgctgaaggtggtgtaaccgccgagaataccggtcagaacagccgcatgcaggaatgaaccgaagcggtcatgccagtcaatcacgaataacgtgcttaaaaaaccgataataaacgcacccgagatattaataataaaggtgcccagcggaaaatggccgtgataacgttcgcctgtcagtttaccgacccaccagcgcaataatgaaccgctgccgccgccgataccgacccagaaaatatcaattgctgtcatataacctcacctgtaaatagcatcgtcaggagaaatacgtacagcggatagtgtagatcctctttctttacttcacaattccctgattgaaaccggctgaatttatacaaagatgccggatctgaagtccggttacaggttataccctgtaatattctgtgactatacggagaacggataccaataactgacggtcagcaggaaaatagccacaccacctgccagtgcggtaaccgtcagataaaaacgagtccgtggtacagttattaccgggtgccgccggatattacggtaaaaacgaatcagatcacccgacaataccagcagcagaatgaccaccagaaatttaccggccaggtataatgaatcccaaaattcagcagaaaccggcggttcccgcaggttattatttatccgttgcaccagtgtaatcccggttgctgtatacaaccacacacggaaataaaaaccggccagcattatcacgcttgtcactactgttttatatctcttcatttgtactctttatacagataaaaaagcgccgatacggaactaatagtatttttgtgctgtcaaaaacagagtaaaaacacactactttaacacacacattaaggacaactgatgaaatcagcctatgttattgctccgctcttcttattaatggcaggatgcagtcagaatgcacggacagagcaggccgcagagaataccaaaacattatatattgattctgaactggccgactgcgtgggtgttgcgccgatgaaatgcatgaaaataaaagaatcccctgatgcagagtgggaatttttctatcagagcatcgacgggtttacttatgaaccgggataccagtaccgggtgtccgttaaaacaacggatgttccgaatccgcctgcggatgcacccaatatccgatatcagttaatttccgtactgagtaaggatcctgtaccggcgaaaggtacaaacgttggtatggcaaacccggcatccgtttattgtgaacaatccggcggtaaaacagaaatcgttaaagcggcatccggctggaccggttactgtaatttaccgggcggtgagcgggtcgacgaatggacttactaccgtaaaaaccataaataaacagatcaaaaagagcgggaaaacccgctctctttatgtatccggtataacaaaggctgtctttgttatttcactaatttacaggtacggcctttatcttcggcaactttgcctttcaccgcatcatcctctgagatgctggccagattcagttcgttttttccgtttgaccaaagctggaaattttcgccgacataacgggcaccgctggcagcaaccgcttctttcagaacaataatttcatcgctgtataccatcactgctgttttggtatccgggaaagaaactttaattttttgcccgtcacagttataggtatccgttttggcagcaaatgcagggcttgccagtaatgcagaaactaacgcaacagcagacacagacagaattttacgcatcgaatgctcctgaaaacgagtaatgcaaccgttaatattattgcgctttgattatgcacccgccatcaataaccaatataggatatctctgtaatcctgtttcccggttaattttcccgctgttgcccggtgatatttaaatcgctattccgcggaacagtgctattatcagtataattacgcaggcattatttgttctttattacgggcggagttataccaatgaaaatattctcatctctgcggcagtttatgcgtatttatcagtcaccggcagtgttgatattgcatttcattatcattatctcggttattcttcaggttgtgatcagcaactggatgtctgtttcagtcaccggcgttattcccgcaagcggctatcgcttattttttacctggctgcatattataaccggtctttcattctgggtttccggtaccctgcttattactctctgctttcatcagcggggaataaagcactattatccgtgggctttcggctgtttttcgcagatagcggcagactgccgcgccctgctgcaagggaaattaccggaatccgctcccggaggtctggcaaccagcgttcaggggctgggtctcggtgcactggtactggtcgtgctatccggtacagcctggcttatattatgggcggcggggtcagcttatgccggtgaaattcgtaacctgcacaaaacgctgacgggactgattgaagcgtatattattggtcatggcgcaatggggctattacactttatactctggttacgaaagaaaaatatttcagacaacaaccagccgggctgatttttattacaggatgtaatgatgaaaaggttattatccgttttacttactatattttcactgaatgcttattcaaatgaaaatcaggattttgaaggtatttgggcaatggtcccgcttaaaaatgggatcgccaatgttgtgcagtataatactgacggaacatcttcgttgtattcgtttaattgtgcaaaaccggatgagaaagaaccggttgaaacatacgcctacaccgtcgataaagaaaataagactatcacactgacatccggcacttatcaaaccagtctgaagatagtcaaaataacaaataaaacaatggcgctggaacagaaaattaatgacgatttcagtgtgtcactgctgtatgcaaaagtctctgacataacaccgctttgcggcctttataccggtgaggttaatcagccgccgaaaacagcctatcagcctgcggattttgttcctgatccggttattccgccgcatccgggactcagccactttgaaggaaagtggatgtacgataatgtcgttcagattgaagtggcaaaagacaatgcaggtaattttattctgaaacttgacagtaatcagaactggaatcatctgtataatcaggttcgctgggtgggtgacgaactgcattttaaatcctatgcatattcggacaaagaatcattatatgaacatccgtatcataagtctcagtctgatagtattctccgcctgacatcagacaccaccatgacacattcccacattatcggtaaagaacgctacgatacaaatctgataaagcaataagcccgcaccgggcttattattagcgcctgcgcggtataatctgtgatttatccaccggtggcagtcccaggctttggcgcttcttatttgcatcatatacagcgccttcctgaattttatagttatagccggcaccgacacaggcttcttcaattatatcctgcggatacagggtatcttcattaaaccggtcaacttcccatgccttgtaacgatctttactatcctgcagcaggagaacagaaaacagttttttcccgccatattgtccgtgtgcatttttttcactgacctgaacgcaatataaattaccatcgctgacatcaataaaatcaccgtgaaaaaaacgggcagatgccggattatccaggttctttttaatcacgctttccaccgaagcaatttcactctttgtcaggctgcgggccgccgcagtgcacgacatcacagcaatgataatccctgtcattatttttttcatattaccgttaccaccctgtaactgtttatctgctttatcagactaaccctgacgggttgtaatacaactgccgtaattcttaaatatgaataaaaaagccgccggtaaatacacggcggcggataatggctggcatggcggttaattgttcttcagattagccactaatttttccagcatctctgctttgtataataccggtgcgatattgccgctctcaagtaacgcattagacacgtcagataacctgaagcggacttctttcccgacgatacccacacggctcgcaatcagcggtttatttttcgcttccgtaccggtcatgaacacactcatcgccgcaatattcgggatcggtaattgacctttttccagcaccagcgtcatttgcagtttaagatcacccggagcagactttttggccgattgcaggcgtttaatggctttcggcggggtcatcacaccggcatagagctnccggcgtgatcatcacaccggcatagagctcgtcatttgaaaaaatataaatctcggcatttaccgccttcatatcatcagcgataaacccgactccgacaggaacgataaaactggcataggaattaaatttctctttataacattccctgtattccgcaccggagaagacagccggcatctgttctttaattctgataagactttttgattctttccgtgaatcttcgaaatcattacaggccgctacttccacattgatattaccggcgaccagtttgtgttcatgagagaccaggtcatccgtatttaccgtggtttcaacatccactttgcaccctgccagcaatgaaacagcgatcagtacgggaagaatttttttcattttttcaccaatatgtatttatgatttatctatttaaacataccggcagtgaaattaaataagtcaggggagtttttgtgatatcaataccgggtggccgggaaaaggttactgcgtgtgactgccggagccttgtgacgctctgttaccgtacgttaccggcactgaaatcatcacgatagcggcaatgaatcagattgtgattttatgacctgttatcaaaacgaggtggatttccggaagccggaagaacatccggtaagcggcgggatatttgtggcttaatccggcaaaaaataagcccctcccggggctgatttactcttaccggcgttttcccggcttacttataggatgcatcaaactgcgtccctttagccttgccatctttaatctcacaaataactttttgcgcctttaagttcatccatactgttgattcgtaaacttcattttcaatatcccgctcaacggtaatgggatattctgaaaaattagcagcacggctcagtatcctgtccttacatgattttatatccgcaacatcaccaccgcctgtttcttcgtattcagtaacagccggatatttcccggattcaatcattttatgtagttgctctattgaatatcccttatcttctccggcataagcaccaaaggtaaacatggctgcaactgatactatcaataactttttcataggtatcaccgtttagctttaaagccatgatactaagcgacatgtactttatttgtagtaagaaagagccgaaatattgcgaatgccaatgttttgtcacgcttttttcctgctcaccaaccggcgcctgcccctaatcagatcatagttacgggcaccgtctgcttttgtgatggcatcatactcatttttcgcggagcctttctcatccggatatttcgctttcagcatcatcacgaactccgacattgtgagttgttccgcttcactacggatgatattgaaatgtacacgaaccgcactgatgtaatcgacggcgcggaacaccggggccgtggcatgtcagtaacgaaggcagattattggttagagatgatgattgacccggaatcgttaatcgaaatccgtaagttggtttctcatcatgaccaggctcaataaagctattgataaaaacccgtaatacacattatgcagcaacaacgaatgcaaacagtaccggcagaattcctgcaatgagcggagaactaaaagtatagaacatggcaaatatggtaatcacaattatcatccttaatcagttctgttccaatcactataccaccccgggatatcgacaggtaaacaacatgaaaactaaaccttgtcggcaggtgcgcggtgcgtattgtcacgcctcaagccgggcagaataaacacgttccgcgccgggttgagtatttacttcagcgtttcaggaagaagcggtgagctgtgtgccctgacgcgggaagatatcaacttcaccgccaagacaatcacagacacaaaaatcaatttaattttttatatcaatatgttaataccgttacaccggcattgacataatttcctgataagcagccaccagtttattacgtacctgaatacccatttgcaggctcaggcttgctttctgcatgtccaccattacatcattaagggaaatatcggctttgccgagtgtgaaatcttccaccttttttgctgaattaacacgggtggtattgatctcattcactgctgagatcaggtgatcaccaaaccccggtgcttcaacgaccggtttcgtctggcttgctgcctgtgctgctgttacattcagctgggagacgactccctcaattgcctgaattgtcatgttttttcttccgttaacagggataaatgtgcactgcggaagccattttctgctgaaaaagacaccggtcacatcctattgcctgcataccctaacacaccctttttaacttgaagcccgtaaataacaccaaaatcacaggctgattctgtcattagatttgttatttgcagggaataatagcagcgtaaaaaagtgacgttacaaagagggaaattacgttgtttcgccaaaactattttcacccgtcaaatctgcaaggcagggaatgtttatgagtgccgcaccacaagacaccggagataccaaaaagggattcgccctgattattgaccgtattaaggctgatccgaaggttccgctgatggtcgccggcgcggctgcaatcgccgttattgttgcgctgttcctctggatgcgcagcccggattaccgcgttctgctcagtaacctgagtgcaaaagacggcggcgatattgtcagtcagctgacacagatgaatatgccttaccagcttgcggataacggcagtgccattctggtacctgctgataaagtgcatgagctgcgtctgaaactggctcaggccggtctgccgaaaggcggtaataccggttttgaactgctggataaagaacagttcggtatcagtcagttcagtgagcaggtgaactatcagcgcgccctcgaaggggaactgtcacgcactatcgaatcactcagcccggtacagaccgcacgggtgcatctggcgatcccgaaaccgaccctgtttgtccgcgagcagaaatcaccgacagcctccgtcaccgtcggattactgccgggccgcgcactggatgaaggtcagatcagcgcgattgtgcatatggtctccggcagtgtgtcaggattaacctcctccaacgttattattgttgaccagaccggacgtctgctgacaaacaatgataacagccagcagtctgtcagcacgtcgcagatgcgtctgacccaggaaaccgaagcacgtctcaaacaacgtattgaagacctgcttgccccgctggtcggccgtgccaacgtgcaggcgcaggtaaccgctcaggtggattattccaaagttgaacaaaccgccgaagaatataaaccaaatcagcagccggattccgccgctgtccgctcgcgtcagagcagccagagtcagcagaacagcaacggcggtcccggcggcgtaccgggtgcattatccaatcagccggtcagtgccccttcagcccctgttgaaacagcaaaagcggatacaaaagataataaaaatgcatctcctgccgataataaaagtaacagcaacattaattcgcagagtgatgagaccacaaactacgaagtggatcgcaaaatcagtcatacccagcgccagattggcgtggttgaccgtctctctgtcgcggtaattattaactggctgccgcagaagaaagaagacggcaccgaggaaatgcagccgctgccgccggagatgatcaaagagattgaatcgctgacccgtgaagcgatggggtattccgtcagccgcggtgacagcctgagcatcaccaactcccgctttaccgatgaaggtcagctgaccgaagagccgtcgctcttcacaagcccggtcatcattgcccaggcactggagtacggcaagattctgctgctgttactggtgggctggctgttgtggcgcaaaggtatcagaccgcagtggcagcgctaccgcaaagcacagcaggcggaagcggaagcccgtatgtttaaggcgactcagatgaagaccccgctcgtggctgatgatgttatcagtgacgatatggacgagaaaacccgccgccgcctgacccgtcagcgtgtcagcgccgaaattcagagtcagcgtatccgtgagatggcggataaagatcctcaggttgtggcaatggttatcagtcagtggttaggaaaagcacaatgaatttaagcggaacagaaaagagcgccgtcatgctgatgacgctcggtgaggaccaggccgccgaggtctttaaacacctgaacaataaagaagtccagcagctgagtatggcggtctccaacatgcgtcaggtctccaatgccgagctggcggaagtcctgacggagtttgaggaagcggcgattcagtatgcggcgctgaacatcaataccaatgattatctgcgttccgtactggttaaggcgctgggtgaagaccgcgccgccagcctgctggaagatatcctcgagaaacacgaaagtgcgtccgggatcgaaagtctcaactatatggagccgcagactgtggccgatattatccgcgacgaacatccgcagattatcgccaccatcctggtgcatttaaaacgcaacctggctgccgacgtgctcgaactgttcgacgaacgccagcgcaacgacatcatgctgcgtatcgccacctttggtggtgtccagcctgcagcactggcggaactgaccgaagtcctcaacaatctgctggacggccagaacctcaagcgcagcaaaatgggtggcgtgagaaccgcagccgagatcatcaacctgatgaagagtcagcaggaagaaggtgttatcggggcaatgcgcgattacgacggcgaactggcacagcggattatcgacgaaatgttcctgttcgagaaccttatcgaagtggacaaccgcagtatccagcgcatcctccaggatgtttccaacgactcgctggttattgcactgaaaggctgcaacgaagagctgcgcgaacacttcctgcgcaatatgtccacccgtgcggctgagattgtccgtgatgatctggaatcccgttcaccggtgcgtatgtcgcaggttgagaatgaacagaaatctattctgctgattgtccgccgtctgatggaaaccggcgaaattgtgattggtggtggtgacgatgtctatgtctgataaggaaaacaccggcctgccgtggaagcgctggcagccgcgggagctgaatcagtgggatctgaattcctctgtgctccctgccctgtccgatgagccggagccggaaaagccgaaagtaccctgcctggagccgaaagaggtgctcgagcagatcaatctgctggataacctgaaagaagaagcgcagcgcagcggttttcagtccggccatgagcagggacagaaagccggttatgacgccggatttgctcagggtctgcaggacggcgctgagcagggccgtcagcaggtactggctgagcagcaaccggtcacggaagcgtggcagaaactgctgtccgagttcagttactctctcgacagttttgacagtgtggtaaccaccaaactattacagattgccctgaccgccgcccgccaggtgctcggtcagcctgcggtctgtgacggtaccgcactgctcgaagagatcagccgcctgcttcagcagaaaccgctgtttgccggtcagccggagctgcgggtcaacccggcacatgctgagatgatcgagcagcatatcggtacccagctcagtctgaacggctggcgtctggtgccggatccgcagctgcatgcgggcggatgccgtgtggtggcggatgacggcgaaatcgatatgagtgtcgccacccgctggcaggagctgtgccggttatacgcgccggagaccttgttatgaccgcgcggattggtcgctggataggcgcactggaaggttttgaatcccggatgtccggcgtggcgatgacccgccactacggacgtctgaccaaaatcaccgggctggtgatggaagccgagggcatcaaaatgccgctcggcgccacctgttttatcgagcgcgtaatcaacgggaacaccgaagaagttatctgtgaagtggtcggttttaacgggccgcgtatgctgctgatgccactggcagagctggaaggtatcgcaccgggtgcccgtgtctatgcgcaatccaccggaagcggcgggcagaccagccgccagttgccgctgggtgatgaactgctcggccggatcctggatgcctccggcaacccgctggacggcaaagggccgctggaagccaaaatccgcgccccgctgattacgccgccgatcaacccgctggaacgatcgccgattaacagtgtgctggatgtcggtgtccgcgctatcaacgcccttctgaccgtcggacgtggtcagcgtatggggctgtttgccggttccggcgtcggaaaaagtgtgctgctcggcatgatggcgcgtttcacgcaggcggacattattgtggtcgggctgattggtgagcgcggccgcgaagtaaaagattttatcgagaacatcctcggcgcggaaggacttcagcgtgcggtggttgtcgcggcaccggcggacgtttccccgctcctgcggatgcagggtgcctcctatgccacgcggatcgcggaatattaccgtgatctgggtcgcaatgtgctgttaattatggattcgctgacccgttacagtatggcacagcgtgaaattgcgctcgccatcggagaaccgcctgctacaaaaggctatcctccgtcggtgttcgcaaaattaccggcactggtcgaacgggcaggcaacggtaaaaacggcggctctgtcaccgcgttttacactgtactgaccgaaggggatgaccagcaggatccgatcgctgactccgcgcgggccattcttgacggccatatcgtgctttcgcgctccctggcggaatccggacactaccctgctatcgatatcgaagcctccatcagccgcgccatgactgagctgattgagaaaagccattaccggaaaattcagcgtttcaaacagctgacctcagcttaccagcgcaaccgcgacctgattaatgtcggagcctacgcggcaggcagtgacccgatgctggatgaggccattcagctgttcccgtatatggcgaagtttctgcagcaggatatcgatgagcgctgtgactacccggccgcctgtgagcagctcagtcaggtgataccggacgcataacgaggtcgtcaatgtcaaatacgcatgcactcaccacgttgttaaatttagctgaagaggccgccgaagaggcggctaaagtgctggcgcaggttcgtcagactcacacacagatgagtcagcaactgaccatgctggaaaattatcaggccgattaccggcagaagctgaatcagacactgcataccgggatggctgccgataaatggcagaactatcagcagtttctggtcaccctcgaactgactattgaacagcagcagggtcagttgaacctgtgggagcagcgcgtcagtgatgccaaccgccactggcaggaaaaacagcagcgcgtcaatgccttcgatactctgatccgccgtgcggatcatgcaaaaaatcaacgacaaaaccggctggagcaaaagcagatggatgaatttgcccagcgcgcgactttatggagaacccgttaatggatgtcaatgccggtaccaaagtggtcagttctgctgacaacgcattgaataaacaggaatcaccgcgtgcggaagatgcacaggcaaccgccctgccgtttcaggccgtgatggatgcacagcagccgcgcccggaaaaaccggcacaggctgtacatgcggtaaaacagacccgtaatgacactgccgcgcataaacaggccgcagaaggtaaagcggtctccgcacaggaaaaacagaccggtgccgacaccatggcacaactgaatttctcccgccgccttgccggggatgctgccgcacctgagctggatgcaaaattgctgaccggcggggatgatgcacctgcattaccgcaaacagaaagtgaaacggacaatgccctgctcgcggtactgaaagagcgcctgagcggacgggacagccgcgcggcggagaaaccggccgcagacacaaagctgcagattgatgacagcggaaaaaacatcgccaaaaccacagaactgccggaagacgtactggctaaaaccggtgataaaccgcttatcacggatgaaaataacgacgcacgcaccctgtttacggatgacaaatcaaagcagcgggtggatcagccgcgtttttcactgaccgatgcacagaaaccggacccgaaagcactgccggaggattttttaccactgaataagaaatccgctgacacttccgtgccgttatcgctggcgtccgccactgataccaccggtgcggataacagcaaaagcgcattcagtatcaaaacagaaagcagtgcctttcagactgtcaccgcaccgggcagccatactgccgtccagagcccggtactgatgccggcagcggctcagagtaccgccgcgcagaccaatgccccggtggctcagccgtccatgcagctgaccgcgcagctcggcagtgaactgtggcagcagcaggtcagccagaatatgatctatttctcccgtcagggattacagcaggcacagctgcgtctgcatccggaagagctgggctccctgaatatccatcttaaaattgaggataatcaggcggtgatgcactttgtctccccgcacagccacgtccgcgcggcgatggaatccatgatgccggtactgcgcaacgcccttcaggagagcgggatccacctggcgcaaagctccgtcggacaggagtatcacggtaatcagcagggttccggtgatgatcgacacagcggcggcagggctgatggtattacatctgccggaagtatcagcggtgtgaatgtcagcacagatacccttgtccgcccgtcagcacttcatgacgcccgcgcccgcggcgggatcgataccttcgcctgattcctgtacataacggcggtaccggggactaaagccccgagttaccgcctttttgtttcgtttttcccccctttagtccttcagaagcacgccataatgggtgggcttacagagtatgaaacccctgccgggttttgctatcaagaaataggaattcagttaacatgtcgtcttcacgcaatgcctcaaaaggttccaataccgggttactggttatctttgccctgattgccctcgcaggagcaggtttcgggggttacagctggtggtcttctcaccaggagagcaccaccgccggtaccacagacgagaaacgggccaatatgcctgagcctatctttatgggaattgaaccgtttaccgtgaatcttcccggtatgaataacggccgtgatcgtgtgctgtatattgatatgacactgcgtctggccaacgagcgttcccgcaaacagctccatgagtatctgccggaagtccgcagccgcctgttacttctgctctcacagcagtccccgcagacactcggaacccatgacggcaaacttcagctgatgaaggcagttaaaaccaccttagccccgaccgtggtacagggacagccggatcaggaaatttcggatgtgttattcaccacctttattctccggtaaaactgatgagcgataatattttatctcaggcagagatagacgcgctgctcaatggtgactcgccgtcagagccgcagcctgccgacacagcactcaataaaggtaaggacaaagtccgtccttatgacccgaatactcagcgccgcgttatccgcgagcgtatgcagtccctggaaattattaacgagcgttttgcccgtcagttccggatgggattgttcaacatgctgcgccgcagtcctgatatcactgtcggtggtatcaaaattgaaccttatcatgaatttgcccgtaacctgccggtgccgaccaacctgaaccttgtgcatatgccgccgctgcgcggaaccgcactgttcacctttgaaccggcactggtctatatcgctgtcgataacctgttcggcggtgacggccgttttccggtccgctccgaaggccgggagttcaccaacaccgaacagcgcattatccaccgtatgctgaaactggcactgaacgcttaccgcgatgcgtggaagccgattgctgaagtggatgtggaatatgtgcgctctgaaatgcaggtgaaattcaccaatatcaccacctcccccaacgatatcgtggtcaccacctccttcctggtggagatcggtaataccgtgggtgagctgagcatctgtattccgattgccatgattgaacctatccgcgagcggctgattaacccgccgatggagcacggtcaccaggaaaatgaagcctgggtatccagcctggtgacacaggtgaagcattccgagctggaactggtcgctaattttgctgaaatcccgctgcggatttcaaaattactgcaactgcagaaaggggatgtgatcccggtggagaaaccggatcgcctgattgtcagtgtggacggcgtaccggtactgaccagtcagtacggcacccgggacggccagtatgcattgcgtgtggaacatttgattaatcctgtattaaacactctggacgaggaaaaaaccaatgagtgaggcgaacaacactcctgatatgaacccggaacacgatggcgagtctctgtgggcagaggctatggaacaacaaaaaaaagcagaaaccgggaacaaccaggcgtttgataatctcgacagccagaatccgctgaatcagctgtctgatatcaatctgattatggatatccctgtccgtctctctgtggaactgggccggacaaaaatgaccatcaagaagctgctgagtttatcccagggctctgtggtggcactggacggactggccggtgagccgctggatatcctgatcaacggttatctgattgcccagggtgaagtggtggtggtctccgacaattacggtatccgtatcacggatattatcaccccgtctgaacgtatgcgccgcctgagccgctgatatgacaccgaccgcatccggcacccctgttttaccggccgcagagaaaacggcagataatgccgttttttcttccgtctccctgccgccgcccgcagtgggttctcaggcgattaacagcacggacagcctgattcaggtgtccggcgcactcagcggcattattctgctgatcctgggactgacctggtttgtccgcaaattcggctttaccgcaaaactgtccggcaaaaacccgctgctgagtatcagaagcacctgttctctgggaaacaaagaacggctggtggtggcggagattcagggtgaatggctggttctgggtgtgaccgcgcagtcggttaatctgctgcaccgttgtccggctgatccggcggcggtaactgatgtcccttccgcctttcaggcactgctgaaaaccaaacgtgccgcaaataaagatgcggtaccggctgacgaaccacgctgagatttttcatgatgtcattgctcaaacgcgccattcccgcactcgctctgtttctgctggttccgcaggcgcaggcttcactgccgggcgtcgtcagtcatgtgctgccggacggcggtcagagctggtctctgccggttcagaccctgctgtttctgacattgctgggctttatccctgcactgctgctgatgaccaccagttttacccgcatcattattgtgctgggtttattacgcaacgcactcggaacaccatccgcaccgccgaaccaggttctgctgggactggctctgtttctgacgtttttcgtgatgtcaccggtgttcgataaagtctacgaagacgcttaccgtccgttcagtgaagacaaaatcagcctggaaacggcactggatcgcggtaccgcaccgctgcgcacatttatgctcggccagacacgcgaaaacgacctggcgctgtttgcccgtatcgccaaagtgggtgaaattcaggaagccaaagatgtgccgatgcgcattctgatcccggcctttattaccagtgagctgaaaaccgccttccagattggcttcacgctgtttattccgttcctgattattgacctcgtggttgccagtgtactgatggcactcgggatgatgatggtaccgcccgccacggtttcgctgccctttaagctgatgctttttgtgctggtggatggctggcagttactgctcggttcgttatcacaaagctttttttagtcaggagagagtatgacaccggaatccgtaatggcgatgggcaccgaagccatgaaaatcgccctgatgctggcagccccgctgctgctggccgccctggcagccggtctgctgataagcctgttacaggccgccactcaggtgaatgagatgaccctgtcattcattccgaaaattttgtctgttatcagtgtgattgtgattgccggtccgtggatgctcaatctgctcactgactatatgcgcgcactgttaaccaatctgccgtttatcatcggctgatctatgttaagtatcaccagtgaaacactgacactgtggctgagccagggattttacccgtttatccgggtgctggcattgctgggtacggcaccgtttttcaatgaaaaacaatcgatcagtaaggtgcgggtgatgctggccttttttactgttctgattgtctccccgcaactgccggtggtaaatatcccgttgttttccgcccccggtctgtgggtgattttacagcaggtggtgataggtgtggcgatggggctgaccatgcagatggcgtttgccgctgtccgtcatgccggggaagtgatcggcctgcagatgggcttatccttcgccaccttctttgacccgagcggcgggccgaatatgccgattctggcacgaatcctgaaccttatcaccctgctgctgtttctcgcatttgacggacacctgtggcttatccatattgtgataagctcatttgacctcattccggtgcaggtcaccccgcttaaccgcgaagggttccgtatgctggtgcagtcggctaaccatatttttctcaacgggttaatgctggcgctgccgtttatcaccctgttcctgattcttaacctcgcattgggtattctgaaccggatgacaccgcagctttctgtgtttgtggtgggttttccgctgacgctgaccgtcggcatcagcatgctgggcctgatcatctccgtcctgccgggctttaccgagcgggtcattcatcaggcgtttgagcagctctcactgatttttaacctgtttgcctctccgtaacctgacctgactcatatccggtgtcaggacagcataaatatccgcttatctcccttaaataaaaaaccggtaatcaccgagaaagtgattaccggatccggtaatggcgtacaaatgaatattgctgtgtataatccggaaaacgacttgagaaataacacggttaccagtttcctgctgaatagcctccgtcaaccggcataacagtgccgttaatataatcagacttcagcagaaaacgaatactttctataatatcattaatggttccgactctatccgccggtgagactaaattaataaaatcctgattgagttctgtattcagcggggactcaatataccccggtgctaccgcattaacgcggatatttttctttgcatactccagcgccagtgctctgaccagtccgtgcacgccttcctttgccaggacactcagtgccgccggtattttctgcgacggttgcagggcaatacaggaggttaccacgataattttaccaccgcgatttttcaacatgtttttaatcgccaattgactcagattaaataaactataaatattactgtttattaaatgcatgaaatcatccggtgtcgttttttcataagttttgctgagaaaagcaccggaattatgaataataatatcgatatttccgaaacgaataataccctgctgcatcagttgtccggcaaaaccggtacaatgactttcaccggtcacgggtaaaaacgcggttttattatccagttcctgcaaaaaactctgcatgtgttcatcgctgctgaatatgccgatcacattgtagtgttcatcaagcagtgttctgactaacgctttccccagacaactttctgcatcggtgatgacggcagtccgctgttgtggtttcataaatagccttcgattatgattcattacttgcaattgatgtaaattattatatttcttcattgcgtgaaataaactactctgacatcacttcattaccaacctgaggttaataatgccgcgtcattttgatgatttgatgctgggtacgctggaactgttctgccgtgcagctgaactgcaaagcttttcacaggcagcacaggcactgaatatttctccggcggcggtcagcaaaaccattgcgaggctggaacagaagctgggcagtccgctgtttgtcagaaccacccgccatgtgcggctgacagaagcgggagaacaatacctcagctattgcaggacagcgctggacgcaatgtatgatgcagagaatgccctgcaggatatgaaaaccattccggccgggaaaattcgtgtttgcctgcccaacgattacgcctatctgaaggtgtttccgctgatgccgaaattccgccgccgttatccgcagattgaggtcgattttcatctccgtttccgcattccgcgccaggaaagcacggattgcgatatcgtcatgaccagctggctgaattacctgcccgactggatagccaccccggttgatttcgctatgttccggatttatgcctcaccggattatctgaaaaaggcaccgccgctgaataccccggaagatctccgccatcacaactgcctgcagatgcatttgcaggaacagaccagaccactgcgctggccgctggtgataaacaataagattgaacatatcgaaacccgtggtgacgctgcattttatgaggatgtgatggccgcatactatatggcggtatccggtaacggcgtcgcaataatgcatgactttattgcccgcaaagccatggcaaacgggcaactggttccggtactggagccctggactaccgtatcccatatttatcatattgcctgtccggcagacgcacgcaaatccccgcgtatccgcgcattcattgattttctgacagaagaactgcggccggccggcgcttttccggaacattcggtgatagtccctgtccgctgacttgtatccggcacaaaaaaaggccgtcgcagtgacggccaaaggaattcagtactgaaaccggataatttaacgactgaacagtgacatactgttgagatctttaaaaatatcctgtgaggcctggaacagcgccatttctttttgataatccgataccgtgctggtccagtccgtgtgaagcaggttgctcagacggctttcgttctggatccggcgggtctgtgacaggaagtccaggctgtcgatttcctgtaactgcaggccttgttttgcttcaatattggagattttatccatcccggctttaataccgcggtttgcttcatccatcccggctctggctctgtccagatcagcctgtgaggcattctgctgaggaattttcagtgcttccagacctttgttgatggcagagaacatatccgccacttttttaccgcctttgtctgtcgtggcaaatacttccgagccggcaaaatagctggtcatttcacgatcactgcccacgttctgggtaatggatttatcgccgcctttgtaaatcacatcgccggtcgcgctgtccacttcaaatggtggcgtatctgattcataaccgccgaaaatataacggccattaccgtccgtcgtgttacccagagacaccagctgatctttcagcccctgcagctgttctgccagtgatgcacggtcattatcgctgagcgcaccctggttggaggcctggataaccgttgaatccatctgtgtggacacttcattcatctgggtgagaatgctcatctgcaatgtcatcccggttttggcatagccgcgtgtggatgcatattgctgattgcggttctcagactgagtgacacgcaccgcctgcgcggatgcctgcgggtcatctgacggtttgctgacacgctgaccggacgccagtttactgcctgcttccatccagcgggcagtggcattgttcatatccgacacacgctgactgaacattaaattggtgctgaaacgcatgataatttccttcttaactcaaaatcagaatgcacgcatcagaacgttgaataactcatcaacggtcgacagcactttggcgttggcattaaagaactgctgcattttctgcatctggacactttcttcgttggtattaacgccggaaatcccctgctgctgctcatagaagctgaccgtcagtttgttctgcacttcggaatcaatctgtgcctggctggctttgctgcccacatcattgaccagtgatgcataaaaatcggacagggttgatgtgccgccgaccagtttctgatcctgcagttttaccagctctttgatattttcattgttgctggcaccaccggtgctgtccgctgcggcgaaatctgccgcatttgtcaccagtgtgttcagaccgccgatcacattatccaccggcttgagcaggaatttatctccggccaccgcgctattgttgctgattttgatatccatgccttcgaaacttaaggtgccggtcgcaccgtcaaaattcgcggtcacggcgataccttccggcagacgggtcacattccagttggtgccgtcataactgacatcgtagttattaccggtgactttggagacatcgttgtatttgacatcaaaatcggctttgcctttattgtgggtattgctgaccacactgccgctgccgaccgcaaagaaatttttgtcagtcttaccgttggcatcatagcctttacggtgaacttcattgaatttttccgcaaagaccagcgccatctggttcagtttttgtcttgccgggtcaataatttcacggcgggaacgcagaacaccgctcagctcaccaccacggatctggtcatctttgatttcacggacattaccggcagaatcaacaaaaccgatgctcagacggctgtcatccgcaccggaagccaccgcttccagacggttagcacgtccgccggtcaccagcggcaggccgttggcaaacgagacgttgaagttgccgttctgctcgatcactttgatgccgataacagaattaagctcattcaccaggcggtcacgcacatccagcaagtcattcggctctgcaccgttaaccgcgcgggagttactgatctgctcattcagcttggcaattttttccgcgtaagtattgatatctttaactttattatcaatctgatggttaacatcgttatccatctcacgcagacggcggtcagcttccttcagctggctgaccatggttttggctttgccgaggaagacatccaccagcgttttgtcactggcgtcagtcgccgcttcgtccagcgaggtgaagaaactgcccagcatcccggcgagatcatccgtgctgttggataacaggtcatccaccccggaggcatttttcatgaatgcttcgtagtcgccgctgcgtgaacgcgcgttgttatactgcatattgacgaattcatcgaactcacggcggacatggctgaaataggtgccgttgccgaaatagccgttggttgtcattgtgcccgggttttcaccgaataccgcgctctggcggtgataataacccaccccggcgttagccaggttgttggaaataacactcagcccgccctgggccgcgttaattccgcttaatgcgttattcattacattattcagcatgtgcttttcctttctctggcgactgctttcccggcgacttactgaaaatacagcgcagatagcatccgtttaaaattatgtcttaccttgttatcggaaagacggcgcaaaaatttagtgttaactgcatttttttacgccgtgaatttgtcagaaaatgtcactcaaatcgagggtgtacgcctgtacggcgcgggaagccaccggtgcggctgcgggcgtgccgcggatttgattaatgaggacaatcagcttgtccgaatagcccgggtcggtggcatatccggccttgtgcagacgctgtgccgcctgctccggactggccgcctgtttcacaccgtgataacgcggattttcggtcagcagacgggtgtaatcagcaattgcctcttcataagagccgtaaacacggaagttatcacgcattttaatggtcttaccgttgataacctcggtggtcatgatattggtgaccggcccttcccagcccttaccggctttgataccaaacaggttgtgactggttttgccgtctgcggtcagaatttcccgctttccccagccgctttccagtgccgcctgtgccaggatcagcagatgatgcacaccacttttctgtgatgctgctttcgccggctctgtcagttttgcaatgaaattctgactgttaagacccagttcacgcacttttttcagcggtgaactcagtgcatcacccgcagaactgaatttccgcatcagctgcgccattgcctgctgcggcatggactgaattaccgtggcatcatccagcgccatcattgatgaacgcagcggcagatccggttcattatccgcagaaagctgcttaaacatcatatcgccgaagcccagccccttttctgacaggttctgggctatctgctggtcatacatgctggtcagcatccgggtctggtcgctggagaacaatccgtcctgcggcagtgcggcgcgcatgcttttgagcatcatctgaacaaaggtcgcttccagttgctgcgtcacctgacgcagcccctcctgcggtttttcattcagctgctgtttcaggctgcccagcgactgcacatcgtaggccgcactctgcatcaactgtatgtcgctcatcagatgatctccagtttcgcccgcagacaaccggcactttccatcgcctgcaaaatcgacatcaggtcggtcggtgtggcccctaatgtattgagcgcctgaataacctgattgagattcgccccggcattcacttttttcagtgtgccgtcctgctcacggatcccgacattggtgttgcgggtcacgacggtctgaccaccggcaaacggcgtgtccggctggctgacctgtgtctggcgctcaaccgtcaccgcgaggctgccgtgggcaaccgcacaactgtcgagcgtgacggtccggttaatcacgacagagccggtgcgggagttcaggatgactttggcttcattctgcggcggacggatattcagatcctgcacccgtgccaggaaacgcacctggtcactgctgctctgcggtacccgtaactgtaccgtgcgggagtccagcggtgttgcggtaccgaaaccgttcatgcggttcaccgcgtcgctgatatcctgtgccagcgcaaaactgtcttcattcagctggagattaatcacgccgctctggccgaatccgcccggcagttcacgctcaatcgtcgctccgccgctgatacggccgccggccagttggttcactttgacactgctgccgccggcactgacaccggcaccgccgaccaggatattgccctgtgccagcgcatacacctgaccatccacgcctttaagcggggtcatcagcagtgtgccgccgcgcagacttttagcgttacccatcgaggaaacgaccacgtcgatcgcctggccggagcgggcaaacggcggcattttggcggtgaccatcaccgccgccacgtttttcagctgcatattggtgcccggtggtacagtaatccccatctgtgacagcatgttattcagactctgcgtggtaaacggtgtctgcatggtctggtcaccggtaccgtcgaggccgacaatcagcccgtaaccaatcagcgcattctcacgcacgccctgtacggtggtcagatccttaatccgttcactgtgtgcggggagacccgccaaacctaaaaccgcaatcagcaggccggtcagtacttttttcattctcactttacctctgctcagtacggtgacacattcaggaagaaacgctgtaaccagcccatattctgcgattcattaatatagccgtcgccgacatactcaatacgggcatccgccacctgagtggagctgacactgttatccgccccgatggtgcgcgggttgaccacaccggagaaacggatagattccgtgccctggttaatggcgatccgtttttcacccaccacatgcaggttaccgttcgccagcagctgatccacagtgaccgtgatagtgcccttaaaggtgttctgggcattcgcgccgcctttgccggtaaaatcactgttgccttttacgtccagctccgtgttgctgccgccgagccagccctgcataaagccgggcagaatggacgcaagaaagccggtttttccggcacggttggcattagcggaggaatttttgctggcgctgacgttttcctgcagattgatggtgaggatatcgccgacattacgcggacgtctgtcctcaaacagcggctggtagccatagtaggcaggctgcgcactctgaaaaatagcaccgttcgcggccggggcagtcggtgcgaccggcagcgcggtggtatgggtatccaccagcggtttgggtttgatgtaagcacagccgctgagtgatacggcaagcactgccgctgtcaccagtccgcgcccgcaaacagaagtggcaggagaacttgcgcaatcctgctgccgtggaacaatgccgctttcagtcatcttaatactcttgctgttctgtgcgtgtctcagtaaaaaagccccggcagcgataacctcaccgccgggacggggattacagttgtgtcagacgctgtaacatctggtcagaggcggaaacggccttactgttgatttcatacgcgcgctgcgtctggatcatattgaccagttcttccgccacgttaacgttagaggtttccaccatgccctgatacagacggcctgcaccgttggtttcaggggcactttctgtcggtgcgccggagctggcggtttccatatacaggttttcgccgatgctctccagacctgcatcattgatgaaggtggtcagggtgatttgcccgatttgctgcggctggctttcgccgtacatggtgacagaaaccgtgccgtcacggccgatttccatcttctgtgccccttccgggatcataatggccgggacaatctgatagccggatgaggtcaccagctgaccgttctgatcaggatgcagtgaaccatcgcgggtataggcatcagaaccgtccggcatctggacatggataaaaccctgtccgctgatggcgatatcggtcgatgtgccggttttgttcagcgcaccctgggcatgaatacgggtggttgcgaccggacgcacaccggtacccagctggagaccggtcggcagagaggtctgctcggaactcatggcacccggctggcggatgttctggtaaagcagatcttcaaacaccgcacgctggcgtttaaaaccattggtgctgacgttggccaggttgttggaaataacatccaggttcgtctgctgggcttcaagcccggttttggcaatccataatgaacggatcatgataattccttactgaatattaactcaccgcaagcagctgattggcccgctgggcattctcatccgcgctgtgaaccactttcatctgcatctcgaaatgacgcgcattggcaatcatttccaccatcgcctgtgccgggttgacgttactgccttccagcacaccggacgatactttgccgcgctcactcaccggcagttcattgccattggcattacgtgccgcagcagtgagatgaaacagcccgtcttcgccgcgcagaacatcctgcggtttcgcttccaccactttcagacggcctatctgcccgagcatggtcggcggatcagtcgggatcagcgcggtgatggtaccgtcaccgccgatggtcagttccgcgtgcggcggcacatcaatcgcaccgccgtcaccctgcagaaggtgttcacccagcatcagctgaccatccgccgaaatctgaatgctgccattacgggtataggcttcttccccgcccggcagtgccaccgccaggaaatgaccttcattcagcgccacatccatctgacggccggtgtagttcagcggcccctgagtcatatccgctccgggggtcgaggagaccaccagtgtccgggtctgctctgtatcgccgtttaccggtactgcccgcatggcggataactgtgccttaaacccggatgtcgagacgttggcaatgttgttcgagacaatggcctgattttccagcgcatgcttagcgccgcccattgctgtataaatgacgtgatccatggccaccttctgtctttatgcttaacgtaagttaaccagcgtctgcagcatctgatcctgcgttttgatggtctgcgagttggactgatagttacgctgcatcacaatcatgttgatcagttcctggctcatatccacgttggaggcttccaccgcgccgccggtcaggttaccgaactgtccggtacccggaacgccgtccatcgggttaccggaggcgttggtggctttccagacgttaccgccctgggatgccaggccgttattgttggcaaacgcagacagtgcgattttgccgacagtccgcttctgctggttggaatagctggcggtgatggtgccgtcattctcaattttgaagctggtgtattcaccggactgatagccgtcgacatcaattttgctgacagaggattcggtgactttctgctgacgggttttattgaagctcagatcaattgtgccgccatccgcgccatttaagcctttataggtgaactgaaaatcagcggtacctttcagcttgccgttgccgtcaaattccatatcacccaggtcctcaacagccgctgttttatcgctgctgtctttggctttgacactccatttgttgtcagcggttttgataaagtaaaccgcgacttcgtgagtgttaccctggctgtcataggtggtcatggtggtgctgaagttgtaggtatccgggttgtccggatcaaacgcagcggtaattgccttatcatccgagttcaggttcatggttaattcacctttggcagatgctctggcgtccatcatatcggtcgggatattcagcgcctgcggaatgccgcccgtctggatagtggcgttaccggcagcatccagacccgccgggaaacctgtgaccatcatgccctggttgttgaccaggttaccgctcttgtcacggtggaattcaccgtcacggctgtaaaccacatcaccgttaccatccagcagacggaagaaaccgttaccggaaatcgccacatcagtagcgcggtcagtacgggtgatagcaccgtctttgaagttctgggaaaccgccgcaacgttaaccccgagaccgacaccggaaccggcaaacatatcagcaaaagaagcatgcgcccctttaaagccgttggttgcggagttggcaatgttgttaccgatcgaatcaagaccggatgaagcggcgttcaggccgctgactgcttgtgaaaaagacatgtcacctccatgacaattgggtttgcttattaatttgacggatacactttaaagatttcagacagcagcacgctgttgcctatgcccacatccagcagcggtgcatccgctcccggtgtcacgccattcactttcgcgtatttcagtctgacgacgccgcttttcgggatctcttcacccttcatggtggcttttacctcaaaggtgtatttccctttggtatcggcaaccagctcaccgttgtcattgcggccgtcccaggttttgtcgtagatatccggtttggtttcaccgtcaatcgtgatggttctgacaattcctttatttctgtcgcggatggttatctcaattttgtccgccggtttggcgaggaagaaaccgaacggcgaggattcaaatccgctgccgctgctgtcatcaccaccgttatcatccgcaaacggcgcaattgatgtgtcatcacccggcggcgggttatcggctttcacacgggtggtgccgtcaccggttggtaccaggaccaggtcactgcccgggatcagaacattttttccgaccagttgcgttgcctgtaatgactgtccggagttaatttgcttcgaaataccgctgacactgtcattcaggctgttcatgctttccagggtggcgatttgcgccagctgactggtcagatccgtgttatccatcggtttggtcggatcctggttctgcatctgcgtgacgatcattttcagaaaggtgtcccgcatatcgtcactctgacttttctgcggctttttctgcgcatcaatgtcgttattgaccggatcattggttgctgcattaatccccatgactcactccgttactgtccgagggttaaggttttctgcaacagcactttggctgtgttcatcacttccaggttggcctgataactgcgggaggcggaaatggtgttaatcatttcacccacagtgtccacgttcggcatccgcacataacccttttcatccgccagcgggtgaccgggtttgtactccagacgcggcggagccgggtcttcaatcagctggctgactttcacgccgccgatgtcatagcgcccctgcggcgcggtctgaaacattacctgtttcgcgcggtacggttcaccgtccggccctgccacactttcggcgttcgccatgttactggcgctgacgttcagacgctgggactgcgcggtcagtgcggaggcggaaatatcaaaaatactcagtagtgccatcagaattacccttgctgtaagacggccagcatgcttttcacgcggctgttaataaaggtcaggtcagcctgatatttcagggtgttatcagcaaactgactgcgttcaacatccatatccacggtattgccgtccatcgatgtctgatacggcacccggtatttcagatcaaccgctgacggtgctgcggcgccgtgtccgctgatatgacctttcgcggtcactgccatcgccagaccgccgttttttaccgtgccgttattcatcgcctgtttcagctggcggctgaaatcgatatcccgtgcctgatacccgggggtatccgcattggcaatattggatgccaggattgtctgacgcgtttcccgcagcgaaagagcctgctgctgaaatgcaaacgtggcatttaacttatcaagcatgtctgccctctgttgatgtgttacgcctgttttagtgacaggtatattatccgtcccgtgaaaatctaatggcaggataaacgcgaaataaccaacctatttaccggattcaacagtgaggaaattgcgtaaactgcgaccatcagaaataatcccgtttgtgaaggagaagagaatgacaccccgttaccgcaccctgtttatcagcggattactggtgttttccgcctccgcacaggccgggttaccggaagagatcaatcattacttccggcagctgcacccgaaacccatgcaggtatctgtcgaaataaaaaccccgatcgaccgctggcctgcctgtaaagacccggtactgcaactgcctgcgggcggacgtaacaccggcaatatttcactgccggtgttatgcggaaaaaaacgcacttttatgcagctgacagtcaatgtcaccggtcagtattacgtggcaacccgtcagattcagcgcggtgaaactgttcagcttgtggatatcggcacaaaacgcggtttacttcacaaattgcctgcgggcgcggttaccgataaaatagccctccgcggtgccattgccctgcgcaatattgatgccgggcagacctatgtcgcctccatgacccgcaaaccctgggcaataaaagccggacaaagcgtttttgtcatggcggatggtgataatttctcggtaaaatatgaaggccgtgccattaataatgccgccgccggaactactatccgggtccggctggtgaatggtcaggtggtcagcggtgaagcccttgaaaacggcagcgtgaaagtatcactgtagttatatgctgcgtgatgaatttagttataaagtttcagataagattgccgataaacaatgagcacaagggaggcgcccctccatctcatacagatcgggaaaaggaaaacagatatggcaattgagcaaacatccgcgatttcagcactgacaaaagtgactaaccgcgacccgaaagagctgaccgcgccggtgcgcgataaaaaagttcaggccgaagagactgtccgcgaaagtgcattttcgccgagtgaacttcagaagcagctgcttgcgccgggtaaaaacgacattaatactgcacgggtggcagaaattaaacaggcgctgaaagacggcacattacggatggatgccggtaaaatcgctgacggtctgctgcgtgatgcgcatgagtgcatgttatccatggacagcgccgataaaaatgactgatcaacttctgccgctgctggatcaacaactctctcatttacagtcactgcatcaggtgatgaaaaatgaagagttgttactcggctacccgcgtgttccgcagtctccgtttcaggaagccacggaacagaaacggtttctggttgccgctatcggccataatgaaacccgccgtcaggcacttgagcaggaagccgggctgtgtgcgccctatgacaataatgaaaccatgcacactgtctggaatgcgatcaaagaccttactctgacgctgaaagagatgaattaccgcaatcatcagatgctgaaactgcatatgcagtttaatcaggagcggctggattttatgaaaaaacataataaccaggcgacttacggcgctgacggccaggaatcccgcacaccggcactcggtaaaaaaatctctgtctgataattaactgcccttccccggcagttaattattttaatattctctgtcccttatctttattaccgttctcacttatattttctgatcagtcctgtatccctatttacgcccatattattgactgccgcccggcagcatcctgaataacatcagatatacagccattcctatatgaaaatataaattcatactttaaatctattattaccccattgaaaataaaatcatttctgctttaaaaatcaaataaataaataaagcaccacaaagtcagcacatcatgctaatcgttctgattgactatcctcattccaaaactgacactcgacctcagtgacatattccgacaattccattgtttgcgaaatataacattagttaacaataaatttacggagtactgaaaagtacatttatgtgtcattaactaaatttcatatttataaggctattgtcgatggataaaataacccgaattctcgaaaagctgaatcagcaacgtagtggtaaaacagtgacgctggcagattttatgccgatgtcccttgccgaagttcgcagcctgacaggcagccgcctttcccgtgaagaagcacaaatgcttcaccgcgcggcaatcaaagaacagcagaacaacattctgtatactgcccgtgcgctgacccgcgccaacccgctgctgaaaaaagagatgggcgctgcccgcacttacggcgcgacgccgtacggctataacgacattatcatgccgcgtgccgatgagtttgccgcacccggtgcggtctcttccatgttctccccggccggctatctgactgagttgtaccgcgaagcccgtggcctgcatcagaaaaacagtgtcaataatctggacaaacgccgcccggatctggcgaagctggtgttatctcaggaaaatctggataaagagatttccaccctgtcactggctaatgagcaactggaaacggcgctgatggcaaaagccaatcagacagacaaaaacaaatattatgaaaccctggcgacctcccgccgcagtggtgtaaccccgtataacgcgccgtttgaggggatccgtaacgccctggcacaacagaattttgttctgccggaccatgtgctgagtaaaggtgcacaatccgctgcacagatggcgttatacgccggtatctcaccggaactgtatgctattctgacagaaaaaacagacggattaagtgaagcagcaaccgaagcgctgctgaagaaaaacttcccgggggtgaatactgacagcctgatgaatcttgatgcgctggcgaattattatgagttgccgcgggatgaggttcaggcattactggagataactattccgtacggttcatcactgaaaaatatacacaatctgtacggacaaaataaaacacagataataaaagccggggacacagacggtgatgtcttttatacattaactcataccagactgaaaaatgaatcttccacctgggtaaatttcgactatattgaccttattccgctgggtaataatcaattttgtattaatttcagtatgagttatcttgataaggcgacttctggtctgcatatcggcgttgtgacaccatactcaaattatccgacagatatttattcatcttttaccgcgatccctgaggaagggaaacactacagtatacagggaacaattcctgccgccaaagtaacaccagaaatcaccatctcggtttacacccacctgaaatataactggtatggacacagcacatttgctgtcaccaaaacgatcgttcctttactactcaccctcaacaaaatcctgcgcctggctaaagccgccggtatgaccccgctggaaacacaacaggcattaacccgcctgaaactgaaagacaccgattcagacgcaaccgtgctgcaccgcttctgtgaatttctgctctaccgtaaacgttacaatatcagcagcgatgatgctttaattctgagcggtgccactatcagcactgtcagctatgacgggcagctcagccagtttgaccggatgtttaataatccgccgctcaatggtgtgacctatacgttaggtggcagcgaaatcccgatgacgccggatgccgaagacccgcgccgcgaagtcctgaaacgcgctttccgggtggataataccgggttatggcagatatttgatgtcaccgcccgtgacgacagtgataaaaaagaaagaaacaatattgaaaacctcagtgatctgttattggttcgtctgctggcagatgtgcataacctgaccgtagcgcaactggacaccctgtggcggatttcaccttacagtacaaccaatatttaccagataaaggaagaaaaacgccgggagctgattaccttcctgtaccagaccacacaatggctgaatacacagaatatcgcagttgaacaactggttatgttgctgacaacggatgcccctgcaaccccgaccaaagagatgaataccctgctggatgcccttcgtaacggtgttattgacagtacagatgtgaacacaatacgtataacgatagccccacttattgccgcagctatgcaactggaaagcccggaacaaggggaagccctgctgcgatggatggataataaccttcctggcaatgtactgcccaccggcaacatctggccgatgattaccaccgaaaaaccatctgctatccagcagaaacacctggcggcatggtgtcaggcactggcacagcgtgtgctggccattcgtatttttgtactcagtaatcctgagcttcaggtattgtcacaaggtgcagcggcaggaactattgccgcactgcgtgaaatcagtgatttccataatctgattaaccgctgtggtgaacaggccggtactgttcttgatgcgctgcaaagtaaaacactgaccagtgctgtacttgccaaatcactgcaactttcagaacatgtgattattcaggcactggcacaggccggacaagcaccggaactgaccacatggcaacagctggccacactgccgtcacggctggatttggcagacaatctgcatatcaccccgaaagagattacccatctgctggcggtatctgaaaatacatcaccttcttatgcaaacctcaccacactggccggattgttacaggtcggactgaacgaacagcagacaaaacaactgcaggatcagtctgaaccgcgccgcagtgaagccctcagcggagagtaccgaactctggttatgggtaaaccgctggcaaaccgtgatgatatctggcgtacactgctgattgacggcaaagtcagtgctgaaatcaccaccacaccgctggcggatgcgattgccggtattcagctctatatcaaccgcactgttgccggtgatgagccgggggcagacagtgctgtgcttgagcgtcagttctttaaagactgggatacctataataagcgctacagtacctgggcgggtgtgtctcagttagtctattacccggaaaacttcattgacccgactatccgcattggtcagaccgggatgatgaacaccatgctggaacagctttctcagagcgagcttaacagcgacaccctggaaaatggcttccgccagtatctcaccgcctttgaacaggtcgctgacctgaaagtggtcagcggttatcatgatgcggttgatattgatgaaggtaatacctggtttatcggtgccagccagactgagccgaaaaaatattactggcgtaaggcggatcacagcaaatgtcagaacggtcattttgctgccaatgcctggagtgactggaaagaaattacctgtgctgttaatccgtatcaggatatggtgcgtccggtgattttccgttcacgtctttatctgctatgggttgaagaacaagtacggaaagatggcgaaggtaaaaaggatatttcgtcttttaccctgaaactgacgcatattaaatatgacggcagttgggcatcaccgttcagttatgatgtgaccaatgaattcaataaccagccccagaagaagcaagataaagcgctatattgtgccacaaacacagccaaagatacgataaccgttgtctgctacaaaaaagaggatgagggcacattacccgggaatgcattcggactgcagatccggcccgatatgaccacagcccaactgctgaacagcaaagacctgctgacagcagtaaaattacagctggatacccttaatgttacccgcattaatacggaagaaagtgactataaggtatcaacgataacaccggaagaccagaaaggatattatggactggaaactaatatttttatcgaaaaaatagacagttacaaagaaggtaataaacagtttttaactgtgcaacccactttggaagccaaaattgatattaccgccatgccgcacatgttacgtcggctatttgccagagactatctgaatttcggatatgatttatatcagtatgagagtgtgacactggctcccggagaaaatgaactgccccggggcgactataacttttatatccttctcaatcactccacccagaattactttttttatctgagcattccgttcggaaaaaacgcaccggattacgctaaagatatcggcgtagttataacgctttctgacggcaccggttcaatcgaaaagctgaactgggaaggcagtgatacacaaaaccactattattccttgccgaaattaggaaaatttgaaccggataccaagtatcatcagatagtgaatttgcattcaggctaccaaggtataataggcaaactgaacgtcagtaaacaacgactggttctgagcaccccttcccgtttgaacaccggcatcaaactttataaaaacagtaacgtactgctggagctttccgaagttggtcataatgccgatacgaaacaaagcaccgcagagggaacccttctgttcacataccgatttagtgcccagaaactggatgtcacagaacacatcgtaagctcccagctggatttctccattctggccagtctgaagaatcaggataataccccggtacacggaagccgtaattataaattacatgttgaattggtgaaaaacgatgccccagtatcaacccgtgccatcgccctgcacaccactgaaggcggcgcccagtatatggaatgggatgcttaccgcacccggctgaataccctgtttgcccgtcagttaattgaaaaggccaaccgcgggattgatgccgtgctgtcaccggaaacccagaacctgcgtgaaccaaaaccgggaccggggacttatgtgactctgacactgaaaccgtatgatccggctattcatggcagcgaccggagatttatacttgaacagagtaatatttttaatacccagccatcattctacaccatatacagcgggatgctcagtacagtaaatactacagtaacactgtttattccgcgtctggagagtgcctatggtgtgaaagaaaacttttatataagagcaaaatatcaaagtggcaggacaactgaaatcaggcttgaatgcccggatacttccaatccgcatggctggacactggataaaagctatcacagcggcaccttcgccggtctggaatccgtctccggtctgtcacaacctgatgaaccgatggacttcagcggcgccaatgccctctatttctgggagctgttctattacaccccgatgatggtggccatgcgcctgttacaggagcagaactttaccgaagccaaccgctggttaagttatatctggcagcctgccgccagtggtgccggtgactggcgcgtgcgtccgctgaaagaggatacctcctggaacgccgatccgctggattcggttgacccggatgctgtcgcccagaatgacccgatgcactataaagtcagcacgctgatgaaattacttgatctgctgattgcccgtggtgacagtgcttaccgcatgctggagcgcgataccctcaatgaagcgaaaatgtggtatatgcaggcgctggggctgctgggtgataagccgatcacgattatcggcagtggctggggtaacccggcactgagtgacgcggcagataagacacaggcaaaacagttccatgacgaaa

SEQ ID NO: 49 - DNA, 26677 bp, unknown
  Altogen 322075 strain
  misc_feature (1601)..(1601): n is a, c, g, or t
  misc_feature (12804)..(12808): n is a, c, g, or t
tcctgccggaggtccgtactgccaataccctgaccgggctgttcctgccgcagcagaacgaaaaactgctcggctactggcagaccctggaaatgcgcctgtttaatctgcgtaataatctctccattgatggccagccgttatcgctgccggtctttgccgcaccggctgacccggccgcactgctcagtgccgcagccgcagcctccggtggcagcaaagccttaccgtctgccgccatcccggcgatgcgcttcccgcaggcgctggacagtgcccgttcgctgaccggacagctgatgcagttcggttcctcgctccaggggctgattgagcgccgggatgcggaagcgatgagtgaactgctgcaaaaccaggccggtgagctgatgctctcttccctgcgtatgcaggaacagtcactcaccgagctggatgccgagaagaaaacactggaacagagccgtgccggtgcacagtcccgctttgacagctaccgcgccctgtatgatgaaaatgtcagtgccgaagaaaaacggaccatggatctgtacctctcttccgcaatactgagcacatccgttgaagggctgaatatggccgccgccgctgccgatatggcaccgaatgtcttcggtatggccgtggggggcagccgctggggcggtatcccgaaagcgattggttccggtatcgcactggcagcctccgccaccaaaattaccgcggataatatcagccagtctgaagcatggcgccgccgccgtcaggaatgggaaatccagaaaaataatgccgaatctgaagtgaaacagattgatgcccagcgggaagcccgggccgtccgccgcaccgccacagagatgcagcgcgaacacctggaaatccagcaggcgcagactcaggcacaactggagttcctgcagcgcaaattcagcaataaagcactctacagctggctgcacggccgtctggcatccatctattaccgcttctacgacctgaccgccacccgctgcatgatggccgaagccgcgtttgcatggcagaccggtgaaaccacgcgctatatcaaaccgggcgcatggcagagcagtaatgccggactgatggccggggaatccctgctgctgaacctgacagagatggagcaggcatggctgaaatggaaccaccgtacactgaaagtcacccgtaccgtttcgctggcggaagtgtacagcgctgataaggtcgatctggccgcgaaaattactgagctgctgaaaggcagtggttccggcagcactccggcacaaaccgggctttcaatgaccacggataaacagttgcatgccgcatttaatctgaaggcactcaacattgcagatgactatcctgccgggctgggtaaaacacgccgcatcaaacagatcagtgtgaccttaccggcactgacaggtccgtatcaggatgtgcgtgctgtgctcagttacggcggtgatgtgaaactgccggacggctgcagagccattgctgtctcccacggtatgaatgacgacggtcagttccggctggatttcaacgacggccactggctgccgtttgaagggatcccggantggataacaatggcagtctgaccctgagtttcccgggggcaacaggtgataagcagaaagccctgctgctcagtctgagcgatatcatcatccatatccgttacaccatccgttaatttttatcctgacccgggcagcctgcgggctgcccgttctggagcctattatgcaacaatcagacaatatcagtcctcaggcgccgtctctgccgaaaggcggcggtgcactgaccggactttccggacaggcgggggccgccggtccggacggcgcggcgtcattatctctgccgctgcccgtcagtgccggacgcggttatgccccttctctctcactcagctacagcagtcaggccggtaacagcgcctttggtatcggctgggatgtgaatcttcctgcggtcagccgccgcacccgcaagggtgttcctgcttataccgctgacgatgaatttctggatcctgccggtgaagtcctggtggctgtccccggcgcggcggataaacgtcaggccctgctgggtgtaaaactggccgtttcttatcagataactacataccgcgcccggacggagcgtgatttcagccgcctggaatactggcagccggaaagcagcaccaccgaaccggatttctggctgtggtatgccgcagacggtcaggtgcatctgctcggttatgaatctgccgcccgtatcagtaacggcagccacacggcccgctggttactgaacgcctcggtctccgccaccggtgagcagatttattaccgttaccgtgcggaagatgacatcaattgcagcgaccgggaaaaagccgcccatccgggcagccacagccagcgctatctcagtgaagtccattacggcaatatcaccgccggacgcacattcccctgttttaacggtaacgatgccaccaaagccggctggctgtttgtgctggtgtttgactatggcgaacgtaccctcaaaccggcagaaaaaccgctgtttaaagccggttccggctggttgtgccgtcaggatccgttctccggttatgcttacgggtttgatctgcgtacccgccgtttatgccgccaggtgctgatgttccaccgcctggagacgctcgctgaaaaagcagaaggtacggatgtaccggcactggtctcccgcctgttatttgagtatcaggaaaccccgtttatcaccacgctgaccgctgcacggcagatggcctttgaagataacggcaaagtgctgtctctgccgccgctgaccttcggctggcagacctttgatatccccgcgtctgtgcagtggtcacagccggagatgggtaaactcaatccgcagcagccgtggcagtatctggatctgcacggcgaaggtattgcggggatcctgtatcaggacaacggcgcctggtattaccgcgccccggtccgtgataccgggagcgatgatatcaatgcggtaatatgggataaaccacaacggcttgataacgttcccgccctgaaagaaggtgcgatgctgactgaccttgatggtgatggccggctgcagtgggtcgtcacacaaccgggtgtgcagggtcaatatcgtcagcagacagataatccggcgcagtggctgcattttacaccgctcagtgctctgccactggaatacggccatcccgctgcacaaatgacggatatcgacggtatcggtgccaccgacctggtgctcatcggtccgcgcagtgtgcgcatctggccgggcggcaaagacggctggttatccgcacagaatattcctcaggcggaaaaaattgttctgccgtcaccggacggcgatgccgccacgctggttgctttcagtgatgtgccgggctccgggcagcagcatctggtacagatcagtgcagacggtgtgctttgctggccgaacctgggccacggccgctttggtcagccgctgacactggacggattcagcaaaaaacagacggaattcaatgcggcatatgtttctctcgccgatattgacggcagtggtactgccgatattctgtatgcccatagtgattatattgagatttaccgtaaccgcagcggtaacggttttgataagccggtcaccgtgaagctgcctgccggtgtccgttatgataagacctgccgcttacaggtggcggatgtgcagggactgggtgttgccagcctgttgctgacggttccccataccgtaccgcgtcactatctgctgcatctgaccactgagaaaccgtggctccttaatcagattaataatcagacggggatgtcacagaacctgcactaccgcagttccgctcagttccggctggatgataaaacccgcgaaccggtttcatatctgcctttcccgctgcacacgttatggaaaacagagactaccgatgaaatcaccggcaataaactggtaagcgaagcccgctatcaccacggagtgtgggatgcccgtgaacgggagttccgcggtttcggttgtgtggaaactctggattctgataccgccgccgcccgtgataccagcggagtcctgacgatgccggtactgacccgtaactggtatgccaccggctataccccggtcgatacacaactgaaaaatgagtactggcggggggataaaagtgcctttaccgggtttgttacgcggctgacaaccggcagcggtgataaagaatccgtctgttctgatgccctggcgcaaaaacaggcattctggctcagccgtgcccagaaagggatgcagctgcgtagtgaggtatacggcaaagacggcagtcagcaacaggatttaccgtacagtgtcagtgaacagcgtctgagtgtccgtctgatcacaccggatgcagatatgccggtagtccggccgtctgtatcagaaagccgtgaatatcactatgaacgcatggccgctgatccgcagtgttcgcagtccgttgtgctcagcgcggatgagtacggttatccgctgcgtgaagcgacagttcactatccgcgccgtccgaaaccggcgaaaaacccgctgccggacaccctgccggcatcactgtttgattccggttatgatgatcagcaatttcaactcattgtatcgttatcacggcatgcacggcaccacctgaccaatctgaaacatgaacagtggctgaccgggcttgcgggcagtgaccgcagtgacgtttttatgctgacagccgcacagcaacctgacacaggctttacagcagaatctctcgggaaacttatcgctgacagcagatctgcacggatttttgccggacagcaactgacacactggctgaacaagaacaataacgtggatctggtgcctgcctggccaccgcggcggcaatatatcttaatcgcagaattggatgaccagatcatttctgaactgaaaacagatttcagcatcacggaacagttgaagaaaagcgactaccggcatactgactatctgtttgcggatgacacagaaaaaaataaaaaaatatgggctgtctgctccgatatggcagcttatggtgatcacactcagttttggctgccaatccgtatccgcgataactctatggtcggaatgcgccatctgacccgcgacaaacatcactgtgttatcaccaaacacaccgatgcctccggacttgtcactgcggcaaaatatgactggcgttttttgtctgtctgcgaaatcaccgataccaatgacaatatcagccaggtacagactgatgcgctgggacgggtgatcagcagccgtttttacggcacggaaaatggccggaaaaccggctacagccataagtccctgacactgccggattcggtacaggacgcagtggatatgcaaaaacaactgcctgttgcacaatgttttgtctatgccgcagacagctggatgcgcagcggtacagataaactgccgccgcatgtgctgaccctgacaactgatcgctatgatgatgaaccggcggataaaagcacacagcaaatccgtcagcaggtcaccttcagtgacggtttcgggaggattttacagcagtccgtccgttttgaggacggtgacgcattccaccgcaataaaaacggttcactggcagccggaaaccggaaaagtgagaaagcagcagtccgctgggcagtgtcgggtcgtactgagtatgataacaaagggcatgctgtgcggacgtatcagccatactttgtcaatgactggaagtatgtcagtgatgacagtgcgcggcaggatctgtacgccgacacgcactattatgatccgctcggccgtgagcatcaggtgatcacagctaaaggttatcagcggcgtacactgtacacaccgtggtttgtggtcagcgaggatgaaaacgataccgcggagtaagccgtatctgtgtacaataaaaataccggtcatgatttgaccggctcaatatacaaaaaacggggacctgttttcacagatccccgcaaagtattatgataatggtttaacccgtgattaaccgccaatcatagaagtcatccgtatctgacggcgatcgttcagttcaaggttggacatcaccgccagctgcggcaggctgcggcgcaggaagcgggataagatcaggcgcagtgagtgattgaccagcaatactgtcggtgcacccatggcttcctggtgctgtaccgcgctcatcgcctgcatttcgatattctgtgccaggttcggctccagaccgccgccgcttttcgctgcctgcaacaggatctgctccagccccgcatccagaccaatcacctgaatttcccctgatgccccgaaccactgctgagtgatagcgcggcccagtgctatccgcacctgagatgtcagaacgtcggtatctttctgctcaccgttctcaccgacctgctctgccagggtttcaataatagtgcgcatatcgcggatcatgacattttcagtcagcagattctgcagcacgcggtggaaaacggtcagcgacaaggtatccgggatcaggtcatccgccagcttcggcatctctttcttcacgcggtcatacagcatctgtgcttcctgacgcccgaacaggtcactggcgtattccagcaaaatctgattaaagtgtgtcgccaccgccgtactggctgagaccacggtgtaaccctgaatctgtgcctgctcacgcagatcatcatcaatccacaccgccggtaaaccaaatgccggttcctgtgtggcatccccttccagagagcccgccgcattgcccgggtcaatcgccagccagcggcccggctgagcctcgccgcgcccgacttccgcccctttgatcaggatccggtaagcagtcggcgccagttcgaggttgtcacagatatgcaccaccggcggcagatagccgacttcctgggcaaattttttgcgcagtccgcggatccgcccgagcagctcgccctgctggtcattatccaccagcgggatcagccggtaaccgacttccatcgccagcagatcttccgccaccacatcatcccaggtcgcttccgtgactttattggcctcacggaactgctgctcctgcacattgttatccgtctctttgaccggctctttacttttcttcaccagataccagccgagagatgccagcgccaccgtgaacagcaggaacacaaagttcggcatgccggggataagccccagcagacccagaaccccggcactcagccacatcacacgcgggttgttgaacagctgggtgaccatctgctcaccggcatcttcatctgttgccacgcgggtcacaatcacaccggctgcagttgagataatcagtgccgggatctgcgccaccagaccatcaccgatggtcagcagggtataggtgctggccgcatcgcccagcggcatatggtgctgagccacaccgacaatcaggccgccgatcacgttaatcaccatgatcataatcccggcgatggcatcaccacggacaaacttactggccccgtccattgaaccgtagaaatcggattcctgggtcacttccgcacggcggcgtttggcttcttcatcattgatgatcccggcgtttaagtccgcatcaatcgccatctgcttgcccggcatgccatcgagcacgaagcgtgcgccgacttcagcgatacgtcccgcacctttggtgataaccataaagttgattaacaccaggatgataaagaccacaatcccgatggcaaagttaccgccgaccaggaagtgcccgaatgcctcaaccacccggcccgcagcagcaggaccggtgtgtccgtccatcaggatgatacgggtggatgccacgttcagtgacagacgcagtaaggtggagaacagcaggatagtcgggaacgcggcaaaatcgagggtacgccgggtaaacatcgccaccagcagcaccataatggacagcgcgatattaaaggtaaacagcaaatccagcacaaacgccggcagcggcagtaccatcattgacaggatcatcaggatgaggaccggcccggcaagtaactgccattgtgctccctgcatcgttttcggtaatctcaaaagtgcagccagattagccatttcgggtattttctccaacaaaatcaagtgcctttggcaccggtaaattcttcggttttttcggtttcaggccgccttcacgacgccagcggcgcagctgaaacacccatgccagcacttccgccacagcggaatacagtgccaccggaattgactgccccacctcggcatggcggtaaagtgcccgcgccagcggcggtgcctccagcagcagaatgcggttctccgcacctatctctttgatccgctgcgccagtaccccggcacctttggccagcactctcggcgcggtcattcttttctcgtcatatttcagggcaacggcgtagtgcgtcgggttggtcacgatcacatccgcctgcggcacatccgccatcatgcggttacgtgccatcgcacgctgctgctgacggattttggcttttatctgcgggtcaccctcctgctgcttaaattcatccttgatttcctggcggctcatccgcagctttttcaggtgcgaacggaactgccagaacacatcaaacgccaccatcgggatcagcataaagataatgaggtaaccggcaaaaatcactttctgcatcgcattggccattgccgttgacggggattccatcgccagatgcagtaaggacggccatgcctgccataaaaaaatccatgcgcccaggccaatcagcagggatttaagaatcgccttgaataattcggccagcgcattcatggaaaaaatacgtttaaagcccttcagcgggctcagttttgtcaggtcaaatttgatggatttggtgttaaacgccagtccgccgaccagtgccgacgcagaaataccgaccagtgccagcccgccgacaaccggcagcatcgcaaataacgcttcaccaatgacttttccgagaaaacgcagcatcagccccggattctgcagataaaagttatcaaagagaaatccctgacgaaaaatatcacgcagttgtcccgccagatggccgccgcttaaccacagcaggctgacaccggccagcatcatcatcagtgagctgagttctttggagcggacaatttgtccgtcttctttggctttctgttttttatggggggtgggttcttctgttttttccacatcactttcatcagacactcacacctccgccgtctgccgggattttgcttatggttatagcatgacagaatgcggcaaattcaatggtggaaaatgaccggtcttaacggtgtaattccctgattaaagcaggagtgatggatttatcagcagaaaatcactcagtgacacccgcaggcagtggtcagcaacgcaatatagtcaaattaagccaccgaacctgatgaaagcccgtatttcgcacggagtgttaaattaggaacaattccgataggcagttgttaccggtactttataatttgccactgttttattccacgataatcacaaggtactcactgatgaaaaaaacaattttagcctgctctctgggtttaatggctctggctctgactgcgtgttccggcgaagaaaaatctgcatcatccgttccgggtgcaactgaaacctgtaacaaatactttgctgaagtcgatgatttagtgaagaaagcaactgaaaaagccggtgacagcgaagcggctaaagcacaattagaaccaatgctgaaacagtttgacgacgcgaaaaaacaaatcgcaacactgccgaaagagcagcaggacgcagcatgcaaagcaggcagcgacgcaatggctcagattaagcaggcaatgggtatctgatttccgttgtgacagactgaccattctgaaccgcggcatccctgctgcggtttttttatatcagaaaccaagctcatcaagcagatcatcaacctgtgactgtgatgccatcacattggtccctttcggatcaatctgcggtccgtttttcagactgtcgaccggatgttttgcacggatttccgcaggggtgttttccatcagcagaaacagcagctgtttctctgtttcttccaccacttccatcatctttttcacgacctgaccggtcagatcctggaaatcctgtgccatcataatttccagtaactcacttttggtcaccgcactgccgtcaatcacccggcggataaacgccatggtggattcctgcagggccggatcgacctccgctgacggacaggattgccagcgcgcctgcaaatccagcgcgtcctcatgcatttttacctgcaacggcttgatagtgtcgatgccgttgagtgttttttccgccgcctgtgcagtcatctgagcgatgtagcgcagtctgtcttttccgtccggaattgtcgcgaccgcctgctgcacgcccttttctaatcccagttcacgcatgctttctcttaacatcctcgttaaaaaaccgacccgggtgatgatctgttttaaatcatcatcactgtttttgtttctgtccgttgatttattttccgtcatcctgctttccttctgctgaagcccctcagttcagacccattttttcgaagactttattcaatttttcctcgaggatcgcggcagtgaacggcttgacaacataaccgctggcaccggcctgagcggcggcaataatattttcttttttcgcttcggcggtcaccatcatgaccgggatatgtttgagtgcatcatccgcgcggatggttttcagcagctccagcccgtccatgttcggcatgttccagtccgccaccacgaaatcaatctgacccgcacggattttctccagtgcatccacaccgtcttccgcctcttcaattttgttgtagcccaactcttttaagaggttacgcacgatacggcgcatggtggaaaaatcatcaactaccagaaaattcaaatctttagcggccataaccactcctgcaataatacaatgaataattgccggttccgtcaggcggaaacggcagcaagtctgcccagcacactgggggcaattttgacaagatcctgaatttcatcgaccgcattcagttcaatcgccgctcgcggcataccaaagaccacgcagctgcgttcatcctgggcatacgtgaccgcgcctttctgccgcagattcagcatgccgcgcgcaccgtccatgcccataccggtcagcaggaccgcgatgcatttgcgggcggcacattcagccacagagtcaaacagcacatccacggacgggcggtgacggttcaccggcggtgtctgctgaagcaccacctggtaaccctggcctttatccgcgatcagcatatgcgcatcgcccggggcaatataagcatgccctttgcgcaacacatcgccgtgttccgcctcttttaccgtcagcgcacagagcttgttcagacgctcggcaaatgagcgggtgaaaccggccggcatatgctgggtgatcaccaccggcggacactccggcggcagcatctccaggaactgacggatagcttccgttccgccggtcgatgcgcccaccgcaatcaggcggttatggcaggcatacgatgacagcggtttgctgataaccgccggtgctgccgtcactttttcctgacggcggaagcggttaccctgcgtgatttttgacatcgccgcggcacggattttttcaccgataaggtcacggtaactcatcatggtttcgcggatcccgatctgcggtttggtgacaaaatccaccgcgcccagttccagggctttcagcgtcacttccgagcctttggaggtcagtgtggagaccatcaccaccggtaccggatgcagacgcatcagtttttccagaaaatcgatgccgtccatccgcggcatttccacatccagcgtcaccacatccggttcatgctgtttaatcagatcacgcgcaacatacggatccggtgccacgtccaccacggtcatatccggatggctgttaataatttcacgcattaactggcgcatcagcgccgagtcatcaacgcaaagtacttttatttttttcatcacttctcccggccgcctgaatgctgtaaacggtctgtcctctgatgacataacgcgaagagagctgtgataagttctccgagtgtccgataaacagcagcccgtcaggcttcagtaacggaacaaaacgttccagtagttgtttctgcatatccttatcgaaataaatcatgacattacgacaaaatatggcatcgaactgcccctgaaactgccagtcgttgtccgtcagattcagataacggaaatcaatcatccggccgagcgccggtttcacccgggcatagccttcatattccccgacccccttcataaaatggcgctgacgctgaagggcgttgaggcttttcagctcttcgatacggtagacgcccttacgggccttctccagaacttcggtatcgatatcactggcgaccactttggcattcatggcgttcgcaccgagaacatcactgagtgtcatggcgatcgaatacggttcttcccctgtcgaggcagccgcgcaccagatagtgatcggctggttacggcgggggcgggtaaagtcagtcagtgtctgaaagnnnnnacggataaagtcagtcagtgtctgaaagtgatgcggctcccggaaaaatgcggtcagattggtggtcattgcgttaataaatgcctgccattccgggtgcagcggctcccgttccagcaaacgcaggtactcggcgaatgtgctcatattgcagtctctgagccgctttaacaggcggttgtagaccatattctttttattcatgctaaggacgatgcctgactttttatgaataaaccggcacacccgaccaaactcatcatctgtgagtggttctatctgtggcgcaaaaagcatcgtacttgttgtcctttcggtaaaaacgattcactgacagtcttcagtacaaaccgatcagttaccccctgacaccggcgtctgcgatacgaaccggtgtcaggcggtgatcaggactgtcagccggcaaagccggactgtgtgcccctgttatccggcagctcaaagaaagcgaccgtgtcgaccaggttattcgcctgatcttccagtgcggctgttgcacctgttgactgctcaaccagtgcggcgttctgctgggttaccagatccatctggctgacggcggttgccacctgctcgataccacggctctgctcgttggaggcagacgcgatttcgctcatcagttccgtcacctggttcaccgcagtgaccagttcttccattgttttaccggcgctgtccaccagttgcgttccctggccgacgcggtcaactgactcatcaatcagggatttaatctctttcgcggcatccgcactgcgctgtgccagcgcacgtacctcaccggcgaccacggagaatccgcgtccctgctcaccggcacgggcggcttccacggcggcgttcagcgccaggatgttggtctggaaggcaataccgtcgatcacgctgataatggcgctgatcttctgcgagctgttggcaatcgaagtcatggtttcgatcacgctgtcggtgatctgaccaccgcggctcgcggttttcgatgctgtcacggcaagttcactggcctgacgggcattatcggcgttctgtttcaccgttgcggtcagctcttccatactggcggcggtttcctccagggaggcagcctgctgctctgtccgtgatgataaattattattgcccagggcaatctcgcgaattccggtatacatctggtctgtattcaggcgaacgtttgagacagattctgccagcgattcctgcatcagcttaagctgaccgaataccacaccgatttcatcacgggtggtcacttctatcttctggttcagtttgccctgtgcgacctgcataaagtgctcgctcatactggtgagcggattaatcactttgtaacgcatccagaaatgggccagaccggaaatcagcagaatggtggcggtcactgcgaagaacataatccacgccatccggttatagaacgtgccggattcaatcgcactgcggctctcttcatccagcagcgccagataatcattcaccaccgcacccattctgtcctgatacatctgagtcgggtgttccacatacgcagggatattggcgtgatcaatgtaaccgcgcagttctttaatcacaccaaggtaagactgatactgttcttcaataccggcaaaatcctctttctcactgagaaccggctgggatttgaagttactgtaatcttccgccgctttatccagcagcaaatcaaatgctgctttgacctggcggatatcgctctcttcagagccgactttaatatgaacaacaacctgggtaagcaggttacgggcctgcatcagatcttcataagaagacaccagtaatgcccgtttttttgagccgagatcgacccgttccagtgacgataattcagatgaaacaatccccagcgataatccgctggacactatctgcatgccgcaaaagaaaataagcaacagatataaactgacagaaatccgtattctcttaccaaacataatgctatccccactgcgtccggccgggctcacctgcttcggttgttgttatcgctgtgatgcacaaaagcgccgtcaggtttccctgacagcgcaaagcacagacgcgtcgttaaaaagtttcccaattgtcatcatcttgatgattcttcgatgatattttgctgagatccggggttttcacgacattggaaatcgttcttgccgccggttcagtgtgtttatcgtccctgtgcttcaaggccggtaagcggaaaatggctatcagctgtgacagtttcgccacctgttcttccagcacatttgccgccaccgcagactgctcaaccagtgaggcgttctgctgcgtcactttgtccatttcagcaactgcaatactgacctgtgaaatacctttgctctgctcatcggatgccgtggcaatgtgcgccatgatgtcggtgacacgggtaacggattccacgattttggtcatggtttcaccggcatcttctgcctggcgggcaccggttccggtacgggataccgagtcttcgatgaggattttgatctcttttgccgcatccgcgctgcgctgcgccaggttacggacttcatccgccaccacggcgaaaccacggccgtgttcaccggcacgggcagcttcaactgccgcgttcagggccagaatattggtctggaacgcaatgctgtcgataacggcagtgatatcggaaattttctgtgaactgtcagcgatattcagcatggtattcaccacgttggacaccactttgccgccttcacgggcaatgtcagaagcctgaccggcaaattcactggcctgatgggcgtattcggtgttctgtttcaccgttgcggtcagctcttccatgctggcagcggtctgttccagacaggcaacctgctcctgggtacgggcagacagatcattgttaccggcggcgatttcgctggtaccctgatagatgttttcgctgccgtcgcgcacaccgcgcaccgtattaatcagctcctgctgcatgtgctgcacaccacggcccagctcagcaatttcattattaccgttcactgcaactgtcggggtcaggtcaccggcagcaaagattttgatacggtcaaccaggccattgagcgggagaataatgccgcgctgtacatagcggtaactgataagactgatcagcgcgaggataatagccagcgcaatcagcatatacagggattcactgaagttatcttccgcgttttgtacttcaccctggaatgccgcagaaatgctgtcgaagtaagcattaaactgctcttcgaacttcatctgataaccggatgtggcataggtgtagaactgttccagctgatcctcccggacataggacatcagccgggtcagtgcattacggtaggtttcataggtggagagcagcttttcaaacttcgccttgtcgtaactggtgccctccatcattttcatgtagcgggcatacgcagcgtctgcatccgctaactgacgggtggcctgtttgatcagctcatccggggtggcatcgtctttaaaggtatgctctctgagcagaaagccgtttgccgcccggtttaaattggcgcgggcctggatcaggttaacccagctctgagtcagaacctgtctctggcgctggagtgagtccagaaaatgaatactgtcgcggttatcacccagtttgctgaacatcagcccgctggatgccagctgcatcagtacaaatataagaataacggataaaagccctgatacaattttaattcggctatacataatttttttactgacgtagtgttattgtatttttgatatcggtcacacgacaaaaaactttagtgatggattaaccaaaactatccggctgaattatcattcagccatgctgtcgatgagtgccatttcctcgctggaaagcagcttttcgatatccaccaggatcagcatccggtcaccgatggtgcccaggccggtcagatatttggttgataaggtgaccgcgaaatccggtgccggagcaatctgctcatctttgagcaccagcacgtcagacacgccgtccaccacaatccctaccacgcgatctttcagattgaccacaatcaccacggtgttgtcgttgtaagtgacgttctgatgggagaacttcacgcgcagatcgataatcgggataatcacaccgcgtaagttagtaacacccttgataaaatccggggtattcgcaatgcgggtgacctgctcataaccacggatttcctgtactttcaggatctcaatgccgtactcttcttcgcccagggtaaaaatcaggtacccttcgccgtttttctcttcatcgagtttgtttaaatcttcatccatcatcgacatggttatttacctttgtttattgcatcacgacgtgtgacgtgttcagtttctttttgcacaaaatttcgttgttcatccgctgcagttccgccacatcaataatcagtgcgacagaaccgtcacccataatggtggcggcagagatccccggaattttgcggtaattactttcaacatttttcaccaccacctgctgctgtccgatcagtctgtcaaccagcagggcgtaacggttaccggcgttctgaacaatcagggcgatactcttcgccagatcacgctccgcctcttcgatgccgaagacctgatgcatttccaccagcggcagatattcaccgcgcaccagcagcattttttcctcaccggcaagacggtaaatgtcttcctgacgcggctggagtgtgctgataatggcgctgagcgggacaataaagacatcgtccgccactttgacggacatgccgtcgaggatagccagggtcagtggcagcagaatgcgggtcacggtgccgcgcccttcggtgaaaccaatctgaatacggccgcccatgtcctgaatgttccgtttcaccacatccatacccacgccgcggccggacacatcagtgatcacttcggcagtggagaaacccggtgccatgatcagcatcgcgatttcatcgttggtcatgttgtcgtgcacatccatgccctgctggcgggccttggccaggatccgctcccggttcagaccggcaccgtcatcccgcacttcaatgcagatattgccgctctggtgttccgccgccagggtcagtgtcccggcttccggtttaccgtttgccgcgcggacgtccggtttctcaataccgtggtcgaggctgttgcgcaccaggtgggtcagcggatcaataatccgctcgatcaggctcttatcgagttcggtggagctgccctccactttcagctcgattttcttattcagttttgaggcgatatcgcgcaccatgcgcgggaagcggctgaagacataatccatcggcatcatgcggatagacatgacagattcctgcagcgcccgcgagttgcgttccagctggacaatcgaactgagcagttccgcatattctgcctgatccacctgctggctgtgctgggtcagcattgactggataatcaccagctcaccgaccaggttgatcagttgatccactttctccaccgccacacggatactgccactgtcacctttattttttgccgctgcagccggtgctttgcgcgccgccggagccgatgacgatgctgccgccggtgccggttcggcaaccggggcgctgacggtttcttcttccgtctctgccggggtattgtctgcggccagcatggcggttaattccgctgccggtgtttcctcatacgcaatctgagaatcatccaccacaaagcagagcacgccgctgatgtcatcaatcgcggtattagtgcccagccagactttcagggtatcggtgccctgttcggttttgtataccgtgccgaacagcgacagctcatcggccagcagagcaacttcgctctcctttaacttactgagcgtaaacgtgaaatgatgtgaaaaaccggtttccggtaccgcgctgctctcttctgagccggcggtaatttctgcggtttcactgaccggttccggcgcggcggtttccgtcacaacagcggcgtccgccacactctgctcgacatgccccagcacttcgcagatgcggttaaagctttcttcatccggcagtgtgtcgctcttataagcatccagctgcgagcccatcacatctttggtatcaaggaagacatcaatgatatccggtgtcagcgtcagctcatcatggcgggctttatcaagcaggttttccagggtgtgcgtggttttctgcaacagcgtgaatccgaatgttgccgcaccacctttaatggagtgtgcgctgcggaagatagcattgagctgttcactgtccggatcccggggatcaagctccagcaggtgctgttccatatcccggagcagctcgtcggcttcatcgaagaacgtttgataaaactcggttatatccatcgcggttatccaatttttttcttgtgttacggctgacaggtactgccggcaatccggcagtacctgtccatcctgtttattgtgttgtatccgccgccgcagcattgttctgcggcggtgtctgctccggtgccgccggttccggcaccttttccggcgggatctccggcggagccggtgtctctgtatgcggcgccggtaactgcttcagctgctgtaaatcggtaatgggaacagctccctcatattcatggagaatatttgccatctccgactcattcagaacgatgatgctgatacggcggttcaccggcgcaagtccggcgtttttatccagatggatggaagatgccatcccgaccacccgcagaattttgttctcagccataccaccacgcaccagttcacggcgtgaggcattggcgcgttcggcagacagttcccagttgctgtaattaccgccgttggcatacggcaggtcatccgtatgaccggaaatactgatgcggttcggcacatcattgaggatcggcgcgatagcccgcagaatgtcccgcatatacggctcaacatgagtggatccgaccataaacatcgggcggttggcactgtcgacaatctggatccgcagcccgtcatcagtggtatcaatcagcagatgcggcttcagttcattcagacgcgggtctttgagaatcgcctgctccagatcctgtttcagtttctcaaaacgaccggcttcatcctgtccctgctcgtcctgcatgctgtccgggtccggcagtgtgtcaccgtctttataaatgatgtctttgccgccgcccggaatcgggttagtggcatccccggtttttgttcccggattgatcgctgttttcagcggtgtgcggaagtattccgcaatctgagtcagctcctgcgggctggagatagaaatcagccacatcaccaggaagaacgccatcatggcggtcataaagtcagcgtaagcaatcttccatgacccgccgtgtccgccgccgtgcccgtgaccgccccgctttttgacgcggataacatgcgtattgcccggtttcatcgtcggtttactccccgtcctgtgcttcggtacggtggctgacttttacttcacggactttgtcttccagctcggtaaaggacggacgatcggcgctgaacaggactttacggccgaattcaaccgcgatttgcggcggataaccctgtaaggatgaaaggaaagtgactttgatacattccagcattttcagctgttcaccgctgcgcagacgaatcagtgacgccagcggcagaatgaagccgtacgcaacgagaataccgaggaatgtcccgaccatcgcatgcgcaatcagagcccccagttcaccggccggacggtcagctgaacccagcgcattgaccaccccgagaacggcggcaacaataccgaatgccggcatggaatccccgaccatattcaggccggaagccggcacttcgctctcctgacggaaggtttccagttcttcatccatcagggcttcaatttcgtggctttgcaggttactggtgatcatcagacgcagataatccaccaggaacatcagtgcagccggatctttgagaatgcgcgggtactgggaaaaaatatcgctttcctgcggattttcgatatctttttccagggcaagcagcccctgctggcgggatttattgagcaactggaacaacaacgccatcagatccattgacatcgctttgttgtaggaggagcgccggaacagacgcggcagtactttacccagggcaacaatggatttcccgctgttaccgacgacaaatgcaccaaaaccggcacctaaaataataacaaattcagcgggttgataaagtgcgcccatatggccgccaaccatcagatagccgccgatgaccgtgcccgtaacaatgatgtatccgatgagtattaacacactattccctttaactcagttaggtatcggatggcagtcaaagggaattttcaggaaggacaggcaaaacggatttgcctgtttaccaaatcaatccagtcacattaccgctttggcaatgccatcctctcgatatagcgtaatatcggcgggaagcgcggaaagtttacgtttttttattgcccgtgacggcggctggcacaaactgcaggtaaaactgttttcagggatgtgcgcataggtgacaaatgacccgctgcagcaactgcagaccgagcgctgaagcattccgctctccacaaaacgcaccagggtccaggcgcgggtcagtgccagcagcggctcttcaccgggcgccggaggacactgctccaggtacagccggtaagcctttactatcacatcaacaccggtgcactgcccgctgttcatcagaaactcataggcgttataaaacatggaggcgtgaatattttgttcccacgtcataaaccagtcggtggaaaacggcagcatacctttcgggggcggacatccgcgcagctctttgtagaggcggatcaggcgtccgcggctgatttgcgtttcgctttccaacatctgaagacgagcacccagagagattaattccatcgcgagacggatatcctgagcctctttgatgatacttttttcggccatgatacttatctttttcttgcgtgtgagtcagtgccagccgcgccgtgcgtttgcagcagacgggttgacagtaaaattccggtatgaacctgttgtaattcatccacgcgggaatcgcgtgtgagtttttcaatggtttcgctgctttcaaatctgaactgacagattagctggttggtttccgctaatttgaccaattgagagagcgtaaggtttgctaacgtagttgccattgcatcgttaatgcctaagcggaacatggcagaagctttttcctgagcaataagtttttgggctaacagcaggtatgagaggttaatatcataaatatgcttcagaaaatcagtcgtctggctcattttttttcctttccgaatatcagcagcaacaaagtacagcagaaactatctccggcgctgtgtgataccggagatcctgttttacgtaatgtaataaataccggagaagttcattccattgtttactaccaatccatataaatatccggcatgcgtgcgaaacacacaaaagtaaacttaaattaaatacatatcaggaatacctgtaaacaataaaggtaacgattaaaatcagcaccagcttatttaatgtctgaatcatcttatatcatttatagacgttatttattatgcaccacaaaattaactattcaagccactgatgtttgtttttggcagagaaagataaacatcccactatgcattagtacaattttactattacttatattttgtctcaccatatcccaaatactcaccgcacttataactcccataagtcaaatgtcaataatcttcaggcgaatacgactcaaaatgtgtgtgactcaagtccattgcaccaatcatataatgtgactgcctatattgatccagatcaatgagctttattgggaaactctgctttaccctatctatcgaaggtatacttagcaaaaatagcggtacaaaactcttatttttcaacgaaacggttatataaagttcgattttgttcattttcacccggtttatgaccctgcgataacaatgtgaaattgtgagcattgcatgacatcccctccgatcaatgtttagttatttttaacaaaaaattgccattcatgatgataaaacataagattatcttatgttactgccagggggattatttgaaaggaaggtaactgaagattaaatgaatttaattcattgttgtgattttcaattcagggtgtctttatttctttttaaaaataatgactctctttttttatatgctcacttatttgtctttccggagctgataaggttatgtatataccttcggatgatacttttataaactccgccgcctctctgataaaccggtactgttctgaaaaacaccctgacatccttctgtcacagaaatggcatcatgccatcacaatcccggcattttcctattagcaaagtcgttaattaaatgtagcattaacaggtaagatcgtgtctgaagtaataacctgtaatatagtaacatatagttactatatacttttgtttttacaaattaaaagtgtatcgcagccatctgacgattcagggtaattatttcacgctattcagtcccgcagaacagtgctctttatcccgcagcactgaaaaccagtaagcagatcaaaatttgcgatcctgcgctttttacaccatcacctgattaccgataaaatgttatcagattgtgattgtcatcacggtttgttgctgcttttctgaaaagtttctgaaatcagggccgatatttatgacagacgtcacgctctccaccccgtaacctcagtttactgccacaaaaaatctgccgtagtgtgacactaatccgccactttccatccaccggatagctgaggatttagttctttattcttaaaataagctaaaaacccccagcctcttccatcaaaaattatcactaaatataaatattctgttgatacacagaataaagccggtggaataaccaccggcacaaaccttaagactttattaaaaaaagagcgatagttgccggctcgcgtacagaaaggcatcagaccggcagttcagaggcaatcatccagttgaccgcactgacacttctctccagactgacccggcaaacaatgccttctatctccttctgctctgccggtgtggcacgcacttccgcacaaacctccagttttccgccggaagtatccgcactgctgagtgagtgcagccggacatgtgaaccattcagcgcctgaaggatcacggttctgaccagaatttcatctttttcatgacaaacggcacggattttatagtcctgtaccaggtccgtggcgtgaatgaccggacgggcattgatgcgctgcgcagcttcccgcagcaaaatattggcacataagataaccagcgctgccgttactgccgggccaaattcccccagtccgcacagcacacctataccggctgagcaccataatgtcgcggcggtattcagcccgcggatattcatgccttcacgcatgataacgccggccccgagaaaaccgatgccggaaaccacctgtgcggctatacgtcccgggctgtccggtgatgtggtcaccgaacttaagataaatacagcggcacctacagccaccagcgcattggtacgcagaccggccatccgctgacgccactggcgctccgcaccaatcagggcgccgagtgccagcgccgccagtaaattgagtaaataaggaattgcaaacatagtaacctccacccgaaagacgcaatggcgtcaggtgttaacagcagaaaaagtaaaaatgactgaaaattctgctcagtaaccaggaggaaagagtgcgtgagaaacaataaacatactgcatacctgtagcagtgatacgaccgggaaccggcggatcatctgtatcaataaaaaagtgcagtaccgtaagaaaggtgctgcccgccattatcattccggcagacaggtttcagaagagaaaggtgtgccggatcagttaattgagttataactgtgactttccaaatccgggtcctctgttcagaaaagatgcgcggagtataggatgtccgcgaaaatatgtaaagtcagaaattatttttcggcgtgatgaatacaccatccccgccctctttttcattgaaaaaccaaatcccctccggatattccggtaacgccaccagatacatcacaccttcactgaacggttcgatcagcaatatccggccttcacgcggctcatccgcatcggttttgacataaactgtgtcgtcaatctgcatcatccggctcccggtcgtcacgatagtgtgattagcataaaaattaagtataaaaaaagcccgccacttacgcggcaggcttggaattcggtttggctatatcttacagcggagttacgttagctgcagccgggcctttagcaccattctcgatggtgaattctacttgttggccttcgcccagggttttgaaacctgcgccttgaatggcagagaagtgaacgaaaacatctttgctgccatcagctggagtgatgaaaccaaagcctttagattcgttgaaccacttaacttgacctttcattttgtcagacatgtgactttcctatatataaataaatgcattgccattttggcaggtactggccggaagcaaaaactaaatggaggcacacagcatatgaaacggtcaaaggctatcctggataacactcaacttaaacgctcaaactcagttgtcatacataaagctgctctttttagggccgcaagcattaactcatgagtggggatgaatagcaactgatttattgccgtgaattttaaaaaaagtgaaagagctcatatttattaacttttgtttggttaattgtctgcgatttcagcgtattgaactgacaatcaggccagacttaagccaaataagactattcttaataatccccgtatcataacagttacccctcacaaagcccgtaactgttctgcgcggttgtgtaccggatatgttaatataatgtatcagaatagtcagcagacctgcggaggtcattcatatggatgtcgtcagaacacttattaccggcgctcttgataatatcaaccagcgtgagaagcgggacggaaaaccccgtttcagcagtcattttatccgcacctatccttatttatgtctggcgatggtggtgtcctatcttgttctgggtgttcttatttattatgcaccttacttcggcttttactggctgctcggtttcagtgccctgttcctggtaatggcagcggttctgctgtttgaagtcagaccggtttaccgctttacggatatcggcgtgctggatctgcgggtgtgctacaacggcgaatggtttgtcagtgaagttgtgcccccggaaaccctggcggcgttacttgaccacccgcaggtcagtgattcactgaagcaggagatccgccatatgacagaaacaaaaggtactgtgtcattttatgatctgcatctgatggcgtacccggaagcgcatccggaaaaaccgcgctctcactggatgaaaggcgcggcttaagccactgtttatgcctgtttttcattcacccgggttacttgctgagcaaacagaataaaattgcctttttcccgttgacacaaccgggacaccccgttaatatgcgcctcgttcccaagggaacacgcttcctccatagttca

SEQ ID NO: 50 - DNA, 1512 bp, unknown
  Altogen 322075 strain
ttgtccgccgtaaaattccgcctgatgttttgcatccgctttttatttctgatagtgatatctgcagcttctttcacgctgtttcaggatacgcatatgcactctgaagacttcgcaacacagcttgcactttatgaaaccggaaccgctccttcccgcacggaagccatcaaaatattcagaaagcaccggacacggcttaaagactggcggatcctgtatgccgacgacagcccggacgggccatttccgctgagacgttgccggttttctgaaaccggttttgtgtccaccctgtttaccggacactcactgtggatcctggatgatgatctattgtcatcatcaggccctcagatgttcaaaaccggatatggtacttatattgattcaaatcccgcaggttatatacgttcactggcctatcgtgaaaatccctcagagaatttacttggtttttgccgcagcctgtccgcttatttttcacatgatgaactggcgcatattaatccgtacctctatctgtgggaggcacaacgggatcgctccctgaaaaccgtaaacgctatccgtgaaaccattgcggcattactggcactcccgcatctgaaacgacctctggatgcggagtggggaaaacaataccgtatgctgtaccgcgaacaggctgaagcagaagcggatcagcttctgtttccgttttatcaggaaccggatgccggcctggccggagcgcttgagcaggagctggatatactggaatgtgttctggtcagaacgaaactgatcgaactctcctccaaaaaatcaccgcagaataaaatgaatgagctgatgcagtttatgcaccacgagctgtcagccatcatgctgcgtgagctgtttgtctgcgcggatattctttttcatgacaacatgacacagatgtcccgcaagctgagcgggttagacatgaagaaagatcctttcgggctgttaagaaactgcgcccgggatctccatatgctcaggcatatggagcggctgacaaactcattatatgatcgtgatgatactgcattttatatcccgtcttttattacgtttgaccgtgatatcgcggatatcatacaactgacagaattgcaggcgattgcactgcaccggacgtccggcgcggtatatcctctctgtaacacaccgctgatgtcatggctttcggaacggctgggtcaaaagcggtttatcagtgctgagcatattttcagggaaaaagggttcagcacacgggcagagggcaggcgcagagtgaatgtgaaaagccttcttgaagaagataaggcaaaactggctgagcttatcagcaggcgccactgacagataagcagtacatccgtactgcttatctgcaattgctcaagccttagccactcagtcatttttttgcattttgccctttacaagctgccgcaggatagctatgattcaccccgttctcacgagaacgcaattcctccatagttcagtcggtag

SEQ ID NO: 51 - DNA, 106 bp, unknown
  Altogen 322075 strain
ccccgcgagggcaagcggaactcataaagtacgtcgtagtccggattggagtctgcaactcgactccatgaagtcggaatcgctagtaatcgtagatcagaatgct

SEQ ID NO: 52 - DNA, 151 bp, unknown
  Altogen 322075 strain
  misc_feature (37)..(37): n is a, c, g, or t
tgttgatttgaattgtgagtgttcacacagattgtcngttgaatgtgagtgttcacacagattgtctgatagaaaatgagcagagagcgtctgcgaagctgactaatgtccccttcgtctagaggcccaggacaccgccctttcacggcgg

SEQ ID NO: 53 - DNA, 200 bp, unknown
  Altogen 322075 strain
tatttaaatccgcattccagtaatgcacgggattctttataacgtttgactgtcagaaatatattagaaatggataccattgcatccggatcacctaattctgctgcacggtaaagataaaatgacgccggtgccggtgctgttttaaagccgctgcggctgttactgcggcgctggctcataaaataaaaagcttccgg

SEQ ID NO: 54 - DNA, 13743 bp, unknown
  Altogen 322075 strain
gaatgctgccggtgccgcctgaaccgacaggaacggaaacagcaacagtaaggagaaagtcattttattcatatcgcatccctgtgatcaccggtgaaaaaccaacaatctgcggccttttatatttcagaacagacctgctaccggcagtatcattccaacagcggtaaagttaaagggaattacagtaactctttgccaacttgtcttcccagtcacacttttctgaactgtgatactgaaattaaatacttattactggtttacctgaaatttcctgccggataaaaacacctgcgtaatttccggcaacgtgtgattagttattatttccataaggacaaacacaaaaaataaaaccctatatttcaattaactatctattattttgttccgcaggtcgtttgccgcccctttgcaatgactgtatattcatacagcgccaaggcagttatttaactatgacatacaacaaaggacggttattatggataataaaattaatgcttataagattattggtgatactccttctatttatgctgaggttgatgagacccggggtaaatttacattaactcttttaaaagataacgaaacagttaagactgtcaccaatacggattgcggacagacatttaatgtaccttcaccgggtacttataccgtttccgttagttattccgctgagaaacattactctgctgagatttatttcagtgaggaagaatttaagaataataaattaaaattatcgtctcctgtaccagagcctgatatgttaaaaactcaggatccattactcgatgatgttgatgattttttaattactgtaaaaattaagaaaggaaaaaaatccacgttagataagcttataaaagggaaaagcgagctttttggtctggcaaaaagtttcattaatttaccttcgtttcctgaagatcaccctgttcatcagtatgagtattatacactcaaaacctcattgccttataatgatgcatacaaaaaatgtctcgaaatggaaaaatcgcaagacattatttatgcttctgtgacctcagggatgataaccgcaacagtatatgatgccggcaataatacagatagcgctgccgccccatcttccgcaacaccagattttaatcacctgcaaaagtatctggatgagccacacggtatgaatatccgtaatgcatgggccagaggaaataccggcaaactcgcttctgtccggcatatcgactttggtgttaatgaaaagcatgaagatcttcagagtggtaacgtaaccattgttgtcaatccgcctaacagtctggaaagtcagcatggtaccgcatctgtcggtactatttccgctgctgataacgggtttggtatgacaggaatggcgcattcggccaaggtatacacatattatgccaatcagcctgaacacaaaaatatcatgaatgatgctaagccgggagatattatcagcgttgatgcaggacgtcgttataataataatgatgttccctgtacagtagcaaaagacttttgggataccgtcaataatatgacgaaaaaaggagccattgttattttagctgcatgtaactcggggattgatttaagtaaaccatctaatttcatggatcatggcgattgtggtggtatttttgtcggtgcctgcgatcccgcaacaggaagacgcgcaagtttttcaaattatggccactccacctcattagttaattcatgggggtataatattgcaacaaccggctatggcaatttgtacaaaagaggaaatgacaccaccaccatgtatacagacagctataatggtacttccggtgcaacacctttatgtgcaggcgccctggcattgctgcaatcacatgctaaaagtatgggtgttatgctcaacgcacaaagcatgcgaaaattactcagtaaatcgacttataccgaaggtgttaccgatggtattggtgtgcggcctaatgtggctcagttaatgcatgaactggataaagaaattttagcgcctcaggctggcgttaatccgttcccgcatgaatctggctatcataaccttctggtttctctggacagagaacaatataaagaagaaaacattccttttttctatcagtatactgatatgccatcaaacgcgtttgtttgttattataaggaacagggccccgctgatttagtctggctggactataatgttactcctgtaaaaataccagtgattgatagtaccggtaaaatttcagtactgtatttaaaaatatcaaaatggaataatgcaggattactttccatgaatacaggagcatacaccagtaccgaccacgggaatttcagaatgcgattaatttatgaccctaaagataatactcatctgaataaaaacgcatatagcggtatattttctgcatatgttacatcatggcattataacagaaaatacaaattgccgttacgaatcaatattcaaattaaataatatgtaagatataaagcccgtttaccggacgggctttatatttctgacaagctaaactataattaaccttcaccacgtgtaactttatccagctttgctcagaaaacacaaataaaatcctacttattactcatttcaacctgacttaaaatccgcacaataatctcaacgggaaaaacctgttgcttcgttttcagaagctcacttaacgcccaccacttgtggtcattgattacctctttttcctgcgtagtccagtcagaaaaattcagctcttcatcactgacattgaccagataaaatcgctcctcagccatcactgtttcaccatttggtaaaagcatcggaaatgtattttccgctaccgcagcaccaaacttttcgcggataattccggtttcttccctgagttcccggcatgccgcctgttcataggtttcacccggttcaagccccccgcccggcgtcgcccagtatgattcacctgacagagcaccgctgttaaaatggaaatgaaataacaatatttcattttgtttgtttaagatgataaatcttgccgaaggtcttgctttcattacctgtaccatatctaccgaaatacaccggccacatcatattactgaactgatttacattacaataacatcttccgcgtcaacttttttaaagataaatatctgatcgccactgttctgtcaccggtggcagtagacaaacaccgctgtaactattaacctgtcaaataagggaattgcagaaaaaacacacaatagatcagagtggattgttgcacttaaaaagtgtcaccgttgaccgggaaataaactcattattcgtagttacaaccgcgatgaatacgaaaatgaagaagccaatggaaatgatgcacaaataattggcaacatgttttggtattccgtccttgattatattgaggtaagtaatggataactttaaggcaagactgaaaaatcatgttgaacatgtaaaacaggttggacagcattgcactaccgaagaaacaacgaaacaagcattaatactgccatttttggatattctgggattcagcccctatgatccgcaaaaagtaaaagcagagtatggcgcagattttcccggggcaaaagcaaatgaacgggtagattatgctcttttttgccaggatgtccctgttatgtttattgaagctaaaggctattttgagaaactggataaccattgcccgcaattatcccgttattttaattcaacgcctgaagtgactatttctgcaataaccaacggattagaatggcggttttttacggatctgaaacaaaaaaatgtgatggacccgactccgtttctcagaataagaatggatgaggtgagtgattcagatgccggtcagttattcaggttcaggcatgacaaatttaaacctgaagcattacgtaccctggcagaggaaagcgtttatctttccgctttcacaaaaacaatcagttcaagcctgagagaggtggatagtgaatttgtccgctatgtggccggcagatcgaatgttgagcggcagcttaaccagcggtttattgattcaataaccccgctggttaaacaggcggtggaaaggtcggtcagtgcgatggtggtatccggtttatcaggtaaaaacagtgctgcagatgagcaacctgactcacctgatgtgattgaaaatacaccggtaaaagagtttgaaaatattgtcgaccctgataatcccaatataattaccacgaagaatgagctggagctttacgacaaaataaaagcgataacaaactgtgatgatattcagtataaagacacagagtcctatttcggaatattataccagggaaaaacaaacagatggattgtgcgctattatgataaaacaaatgcctttattcaggttcccatagaaattaccgatattcttgccaatgaagtggcccgtgccggtcttgagctgaataacggaagaatatcactcagatgccccgaagatattctccgtataacggggattattctcgattcatttgaatatgttaaaaatgatgagaactttctcagaaaaaagcagagttaatcattgtagtatccggttacccgccctctgctgagggctttttacgtttaccgggtaacctcctgctctgcctgctcccgctccatttgttcagccagttcacgctgcttcacattccacacagagccctgcggcatttccacacgtacatcaaggcgggttgattccggcagggcacatggttcgccgtcctgatagaaaatgcgctcaccttccgtggtaacctctttcagtcgccagttctggaaacgctcaggtaaatgcgcatgttgccggtgacaagtttcaatgataatactgccgtcttccaacacccggtccgcgacataaacgagctccagaccgttgttgtctttcggtactgagatgccgccgtttacgccccatgcaccatctgagttataaccaaggattccggtaatgtggtactgaccggtagctgtgcggcggacttctgcaccttcggattcgtcgttggtttcgtagttaccatcggggtggatttggataaccgagattgttctctcctgttgccgcccagttaccccaccgttctaatgccacctggatatctctcattctctgtcctccgcaaaattactgtgcaaatatacagcatttttatggctgacaaaaatgcgctgcggaagatacgtagccgaaggatatcgtgtctcagaaaaccgttctgaatatattaagcagcgccggaaactcagtatatccttccctgtccagaaaatgtccggcgttattttcaataacaacctgagtctgcaacgactccgccagcgttttcgatgcctgcgggctgaccacccagtcgtcagaagatatgactgaaattcgtttatcggaaatctctgtcagcttaatataatccagaggatactgaacatgcgcctccagctcaggtaatgtttcctgactgctatcaaaaccggagactaaaatataaccgcccagttttgtcccttccggaatatgttcagcgatatatcgcagtaccgtaatacaaccaagactgtgcccgacaaaaatcgtattttcatccgctgttatattgttgccgataaggcattgctgccatttttgcggatcaggagaatgcggttccggcatcgcaggaacagcaactgtggcaccaagcaattccagttctttttttaaccacggaaaccagttatctgccggtgatgcagtataaccatgaacaataataacgttttttcctttcactctcagccccggtcttcaggttgaattcacaacatattggttttatctgactgttttaatataacattttctgtcatatttttagccgttttttaattgtttcaactaagagacacaaaaccattttccataaaaatctgttgtgattcagtctgtaacaggtaatcagcgaaagtctgagccagcggtgatattaaggccatgcaatatattgccttaatattatctgcttcaggaatagagattgtcgcgagcctcggaagttgtgacgtttttttctgatagtgccggtaaccaataaatacatctgcctgatgagaatgaatcagccactgagacgccatttgtcccgcagggatcgccggggaattttttccgcccaccagataccgtgtacgattgcggatattttccgccagttccggatcggctttactgagttcagaataaaactgcaccacataatcgccgcagggatcatccaccggcgttgaggtgccgataattaaatccggagcacgcagtaattgctgccagtcaggatattgttcagctaattcagtggtggtggtaattcctaagtaattggcaataaaaggctcaaccctgaatgcgatattattccggagtaatgcttccggatgtgcccggtccgcagacaaaaacagatcgcactttgccccggattcaattttttgccgcaataaaccggccggaccaaaatcacaggttaccggcggtattttattaccggaataacgggctaaaatggcagtcagcgttccccgcagactgccggccgccataatatgcattaatgactgccctgatattgagtgcgatagaatttctgataccagttattaacatcagcatccacgtcaatatcggcaaatttctgcggatacaatttagccgccatccataactcaccgattgccattgcttccggcatcggatatccccaggctttggcatattccggcattaaatagacacgtttatttttcactgcatcaataacctgccagcggggatcattattaatttcgtcaacaacacccgggtagcgatcctgaataaaaataacttccgggttccagctgataacctgctcgagagaaacctgtttataccctttgatagttgcagcggcgacattcattgcgccggcgtgctgcatcattaaaccggtatattttcctgatccgtaagtggttaaatccgggtttgccatataagcccggacacgctgattttcagggatatctttcgggcgacgggcgactatatccctgctgtcaaaggtttgtttaatcagctcttttgcattgtccggcttattaacgatatcaccaatcagggtaatcccttctttcagcccgtcattataggcttgttcttcattatcaagctcaggattcacattatttttggcgtggctgctgttgtctttctgcaatgaaatggcgataaccggaatacccacctgcgtaattttatcgatcatttcctgtggcgcataattagtgacaaaaaccacctgcggtttcaactgcaccagactttcaagattgacacttttcagatcgcctacattgggcactttcgctaattcaggtgccagccgttcataattctgaccgagctgctcacgccagtttcccatcacgcccacaattttgtctgttgcatccatctgaaccagtaaattcagtgtctgatgctgaagaacagccacccgctcaacatgatcatcaataacaaccttgcgccccagctgatctgtaaactcccgcgccgcctggccggagaatgaaaaaatgacagcaattaacccaatcagatactttttcatcgttattacccactccaatcgatatatacttggttatatatcgattgatttcatgggtcaactgtttccgggggtattacagagcaggaatgcgatattctgcatgcctgtaaatgccccggaaaccaaaaacctgccttaacataaaaatcagtaacaagccgataaatatcctgatgagcacagcgaagattggataaaggtacaaaattaaaatttaatatatgagctccggaataacggaacatgtaaactatccgtgaattgcggagagttgattctgaaaattatcgttaccaggtcagcctgtaactatcatcaattaatgacttcagttcttcactgctgaattcagtatccagcattatcgtaacccagtgttctttgttcatgtgatacgcaggatagataccatcctttaagcggagagagccaaccatttccggtgcagctttaacattaacaatatccactactttctctgcgtctccggcgcctattttatcagcagatactgacattatgatggcaaaccatttggcatttccgcggtgcctgaataccgcataatccggatatttaatccacggatagtcaggggctgagccgtaattagtccggatatattcaatcagatcgttctttttcatatcagcaccttaagtaaaccattaatggctatgtcagataccgatattacatctaatcaggcgggtaacaaggaaattgacagcaggaaacttccggcgggattctgactgctctccggcggataaataataactttaccaactgatattacagcatttattatggcgctctgatataccctgtttttatgcagtgatatttttgtacaaattaaaaccagctcacaatatgttaagctggctttattgtgtatttgttattcttaaataagaatgatattcatttttatatggtaatgaataacatttatgattgtattttttgcattatcagattgctaaaggctccatatatacaaaggagctttttactgattcagtataatcattctgagtttcaggaaacagatattcataagacacatgaaatatatttattatcttaaatacaacactgacatctattttattaacaccccgttcataccttgacaactgctgctgtgagacccccagcattttagctaacatctttgtagtcaagccattacggtgtcttaagtcgcggatattctgccctacaataaaattaatatctttcattatgaacctcctgataaacatatattaaaggtaaagcataatatgctgactgacaaactaagctaccaacaaaaaatacacaactcagaataataaactaaaaacaaaagacatttatgggtaagaatctttaattattatttaaagacaagcaaaaagagcaattaaccccattagccttaattataaacctaataccaagtatttatacttgtttatatttcgtttaacttttagcaggtatattcggttacagaagtcgcaagtatcccttccgttaatcaatttgcccggcaatagccgggctgttttttatctctccggctgtatcagccttaataatatccatcggttatcatgtctgtttatccgaccaggcaaatactgtccgcttccctttatctgaaacagtcctgattaaagttttccggttgcttcggtgaaattccgtgatatatgggatgatcacctgcatgtcatccagcaaaaaaccggaacacggcttgctatccccctcaccctccggtgtcaggccctcaatatcagcctgcgggatgtgatcgccggatgccgtgatctgtatgtcagcaaatatttagtccactacacacgaaacacatcacaatcacaacccggcggtcaggtaaccgctaataccctgaccaccaactttaaaaaagccagagataaaacggatatcgattggggagaaggtacgctagcaacatttcacgaaatgctgtcattgtcagtgcgtttataccgggagcagggaattaataccaaaaacctgctgggccataaaaaccagcaacaaaccgataaatatcatgatgatcgtggcaaagattggataagggtgttgatctgatattttattagcccataattgaattcgtatatctgcctttcaaactgcatatcagctttgtgccaaaagaggaccttttacccttacatgtgtataaactcgtcctcagtcctaaattctcaacgtatcgataactgctcgcagagcaggcgacacattgcggtgcggataatatagaaatgagccttccaggcgttggctgtaacgttgtaaaactctgatgagcgaaccctgttctaaatcatcagataccaactcttcgggaacataagccaatcccaggcccagcctggctgctttggcctccatatagctgtcagcgaaaatccactgcccctgcggccgatgggtgatttttttaccgttatggtgaagttcccacgagtacagtttcccgtcgccaaactgataagcgatgcagggatgaaccgctaaatctgcgggggcttgcggaaagccatagcgacgaaaatgatcaggcgtgccgacaacagccatctccatgtcaggggaaatacgcacagcaaccatgccactacctacttcaggccccaggcgaacacccgcatcaaacctctcggcaataatatcgacaaatcggctttcgctaataagttcaagtcggatatccgggtagctcttcttaaacaccgcaagctttggcagaagcaatttatcaatagcatgctgactggcattgatgcgtaccgtccccgatggggactggcgataatgagccagcgtgtccagccccatatctaaagcgtcgaatcctgcttcaatggtccggtagagcttttcaccagcatgggtgagcgataatctgcgcgtggtgcgtaccaggagctgaacacccagtcgttcttcaagttcccgtactgaacgacttattcctgattgtgccaggccaaggcgatgtgctgcggctgtaaagctcccttcccgtaccacctgcatgaacaggtacaaatcgttatagttttcccgttttgccatcattccgctcccgaaaccacttcttaatttagaacaatatggtattaatcctagcactttcctccctctaatcagcactatttccgctaactataatgagtgcattgctacaaagcacagcagtgttgtccgtatgaaacctgtttcaatcacgttttataaggggagttttgatgactgttttcactcaaaaactggcaactgcgatacctgccatactgttatgtgcatcattaagtggagtcacaaatatgagttatgcagatacaactaatccgaacgcgcctgtttccctggtcgaaaaatgggataaaacattcccagaaagcacgaaagtggatcaccgtaaagtgacctttcagaaccgttacgggatcactttagtgggggatctctacatccctaaggatcgtagtgagcgtaagctggcggccattgccattagtgggcctttcggcgcagtgaaagagcaatctagcggcctgtatgcacaaacgctggctgaacaggggtttattaccctggcgtttgacccttcgtatacgggagaaagcggtggctctccacgtaatgtcgcctctccggatattaatacagaggattttagcgcggcagttgacttcttaggtctgcaaaaagaggtggatcgcaatcgtatcgggctgctcggtatttgcggttggggcggcatggccttaaacgacgccgcaatggatacccgtgtgaaagcggtggcgaccagcgtgatgtatgacatgagccgtgcgatggggcatggtgtgggtgatggtaaagaccgctattccactaaagatcgtcgcaccgtactacagcatctgaacgcacaacgttggaaggatgcggaaaatggcacttacgcacccggcggccatgacattaatgttgatgagaaaggtaacgtcagtgcatcggatcgtgttttgccggaaacgttacctgccaatcctcatgctgttttgaaagaattctttgattattatcgcatgccgcgtggtttccatgtgcgttcggtcaattcaaccggggcctggaatgcgacgatgccgctgtcatttatgaatatgccgttgctgagttacgccaatgaagtcactatccctacacttattgtgaccggcgaaaaggcccactcacgctattttgctgaagatgcctttaaggccattggcagtaaagagaaagagctggtgatagtttcgggggcaaaccacgttgatttgtacgataacgttgcgggcaagatcccgttcgctaaatttgagcagtttttcaaagctaacttaagataacgacctgaaactgcctgctgattgcaggcggttttaatcgtccgctccccattctcatccgcatgttctcgttattctctgaatagtgtttgtcccggctgctgctgaatctcgtcacgtccatataaagagatgctgataatgtccataataagtcttaaaagatcacctaagaaaacagatgcgcactggagtggcgtgtttgccatgacgctctgcgtttttgtactaatcgcttccgaatttatgccggtcagcctactgacgcctattgccagcgagctgcacatcacggaaggcctggcaggccaaggaattgcaatatctggcgcgctggcggtactgaccagcctgactatctcccatatcgccggagatttgaatcgtaaatatcttctgctggggctaaccgtcctgatggccatatctggattggttatcgccatggcacccagctatccggtttatatgctggggagagccctgattggcgtcgccatcggtggattctggtcactctcagctgcaaccgccatccggctcgtgccgcagcatcaggttccccgtgcactggcgatttttaatggcgggaacgcgctggctaccgttgtggctgcgccacttggtagctatctggggacaactgtcggctggcgtggggcctttttatgtatcgtccccctggcgatagccgcgtttatctggcaatgggtcagcctgcccactatggaaagcgataaaaaacaaaagccacagggaactctgcttcgtctgttcagagacgccattgtactaacaggactgctggcctgcggtctcttctttattgggcagtttgccttatttacctatgtgcgcccctttcttgagaccgtgaccaacgtaggtcctgccgggctctctctgattttgctcgcaataggcgcagcaggttttgtcggcacattagccgtatcgacattcctgaatgcctggttgtatcaaatattaataatgatccctctgcttatggcaacggtagccggtacattattgctgttcggacacagcatctgggcggttaccgttttactaagcctgtgggggttactggccacggctgcaccaacgggatggtggacatggattacccgggcgcagcccgaagatgctgaggcgggtggcggtctcatggttgcggtgatccagctttcgattgcacttggttcaacggcaggaggagtggtattcgacagtctgggatggcaaagtgctttcggcctgagtgggttattactgctgggggcggcagcgattacttacgtcacatatcttcaaaacagtaaagcgcactagcacaatccatttattccaggtgtgatcttaattgtggcatatggcagagagccgaaagtttgctattcgctcaaagcagccatacttgcttaaaacccctactcacctgaatcttaaacacatcacaaaccgtacaaatttcataccgttttgctaaatcattttgcaaactttttgataaccgtttcaggccggacaataaaaaacgggaactaatcagttcccgttaactatttcgctgtaaacttaattacatgtgtttgatgattgcgtc

SEQ ID NO: 55 - DNA, 3901 bp, unknown
  Altogen 322075 strain
gtagattgaaacccaatttataaccacatgattaatataactaaaaagcactaaaaccatgcttatatatgggtaaaattcgttttttcaacctattgattgctttgagttttgttttagttttgataaccggtatttctgttggaatgtcctttccgttccgctacgatagctcttcttaatttataccgaggtaagcatgcgaaaagctcttattgaattaagtgatgggatgaaatatgcggcactgaatgctggcgcacaaggaactggaagatgcctatttatgataataatgtctaatgatctgaatacagccatcactccagatcgatggcttaaagccatgaataaatgctatgcaaaagctgaagaattaaaatatgaagtggcttacgtccgcggtgagagcctgaccggaccatttactgattgatcttatcactccatcatgaggtgtcgggggtcgcaggttcaaattccgtcatggtgaccagtattttcataataaaaccaaatacttatagtttgtttttgtacgtgtaatttcaggcggggtaactcaggggtaaaaccaccgtcagaaatcaggcattggctcaatacgtttattcgatgttgagccatgttttaaacagcccgcacagttacgcacgctctatataaatcaacaagtaaacagattgtttaaaatcacacacccgcacattcgtgcacacttgcgacaactatttgccccaccggtgccccaaagatcaaagtcaatcttgacagcattattctgccccgttaattcatactgtatatacaaccagttaattaagaggtaatcgcatgctccgtattgatgttattttcagcagtaaccaaaaagagatgatgccggcggggacatttgaggcgttggaaaaagaaattaaccgaaagtttcgcgcctagtatcaggatatgaacattcgtattgcgtggggaaccaatgcatcgatgtcagtaatgggcgggaaaaatgataaggacaataaaaaaataaatgatatatttcagaaaattatggaggataacggctggataccggaagtggaaggtgcttctgatgatgtggagtattttgataattagctaaaactatagcggagcataacaagtctgactatcagttctgtgccaaaaaaaggggtatcaaatctcaaaaattcagatgtgatggtagtcaactaatcgctcggaaacatttgctattcttggctatagaattatattccacattacattttataattttttagggttgccgtgataacaatcagttctgttaaaaaaaagtatgaaaaatctacaaatcattctaatccttttattggtcttgatgagttcgagagggattggtttgtaaaaacatatttcaacgggtctgtgcatgaaacaaatgcattgtttaatgaatttgtagcttttaatttagccggaaaaataggcttgccttggccaaaaggccatgttgctaagctttctgaaaaagtaaagagtgaactaggcttatcaatttcttatgttattgcatatgagtacatacatagcatggaagatatacctggtgattttaaattcagtgatgagcagataaatgatctttatgggaaatcgatatttgataactggctatctataggtgacgcaaaacccgatacctgcaagttatcaaatggcaatcttctctttatggatgctggaatcgcctttgaaggtgatagtggtgatacatgggatgaaaatggccttatctggacagataataaattatttattgaatcatcgccatatcatgacggaattttgcgttccgcaaaaggatataaaccatggatgaataaaatctgtgaaatacctactgattattatcaacttatcacagatagcatccctcaagattgggatattccgcaaagttacaaatcaaaatttgttgaggtattttcatcatcttgtgacaaatttattcctatgatggactcccatattgagtgggaattgagtctccgataataatactgatagccaaacgaaatgtcctctcctcgctcacagcggaccttgagcccagttaactgttcgctccgtgccacaagcggacaaagctgacataactctatacggagtcagttagtgagttcgccctctaccacccatgatgtgcacgtactctaagctacagttgcttcataacgttgtattggtcttactgatacgctagtctatgtttcagaaacaacattaagggttctttaaacttttttgtttacaacaaatatcatatgattttatcaataagtctatttagtaggatatggttatggaattttattctgaaaactcggataagaaagatgcattatatctgctttcttatatagattatgttattttgcctgcttcagtcgatttttttgaaaaactagaaggtaataccctaaagttgcatcacgttttttcatttaatacaattcttgctcatgcgacggattatatagtttatatcgttaacaaaaaagccagcataaaaaggtgtaattttctgaaaggctttgatgaaagatactctgtagatggatgttgttttattaataataagtttgagcttttagatgctgtaaataattcctttaagcacgttgagttaaaaaaggaacgatatcctgggttgataaaaagatatggcgatctatcattccattgcttgaaagaagattctggaaaagttttttttagaatgcctaactatcaatttgattattctagagtggttctaagaccaattgccaaaatattcgattgtggactcaaagataataatgatattgatgattttataaacggaaaaatctttggaagttgtggttatggtcattttccatatgattatgaaccatatgattcaattgatagaatgatagattactgtaacgcacaatgtatggactgtggtgagtatgcggataactgtgattgtcataattttgaatataataaagaaaaaggtaaatataatccaaacttagatccaaacttcgattttgatgatgtcatgtcaaatattagtggcacaagggagtggagtaagtgatatttgcatttttgtcattaacaaatctatatttattgatggataaatcatcagaaaaaatattgaagatacttatggaggcatttctaatgcttcaaatcattacatataaatataaaacaaaagtatagttgtttggttttatttctatgatctcctgaccaaccgccaaccaatgacagtggctgctaaaatttgccattttaacagatagcgactcttccatagtaagcgaatatccttatactgagataacttcaatatttgggtatcattaatcaactgaaacaaaaacaaacagtaacgaggttatatgtttaatcttgcacatgttaaaggtaacaatacaactggtgtgcatatgctccagcgtaatcgcaaaagtggtggtttttgcattagaaccagtcctgatacgttgaaagcgttcacatctgttgaaataccacccgcataccgcacccttttcaagggaaaaaatgagctttatgaagctggaccatatgaatccattgaggaaggcgctaaagagttatgtctgtttattgagcggatctacggtattacgtgcatttgggatcctatgagaaaataataaatacattctatttgacgatagccgcgcctggctcccaccagcgcggctttgttttattcctctgagtcttcggcctgctctgctgcttccttctcctcacgctctgcctcctcacgttccatctgttcagccagttcgcactgtttcatattccagacggagccctgcggcatttcgacacg

SEQ ID NO: 56 - DNA, 493 bp, unknown
  Altogen 322075 strain
tggccggtgatcaggttaccgttaatatcccgcagaatcagtttcagtccggattcagcagtgccgttggcgacaatcgtatccggtaatgccgtcagttccgatttagtcccgtccggattatttttatcaccaatcagtatcacatcagcggtaatacctgccagttcagtaccgtttactttcactttgatcgtggcggtaccagcagttgtccctttaagtgtcgcggtataaacgccgtcctgaggttcgtcattatccgttattgccgtatttcccagcgcggtaatgaactccacagtctggcccggcagcaggttgttattgacatcgcgaaggataagtttcagtactgccccctccttgccgtcagccacaatctggcccggtaatgcggtcagctcagatttcgtgctgtccggattatttttatcaccaatcagtttcacatcagtggtaatgcctgccagttcagtcccgtttaagctga

SEQ ID NO: 57 - DNA, 3199 bp, unknown
  Altogen 322075 strain
  misc_feature (2590)..(2674): n is a, c, g, or t
cccggtgatcaggttgccgttaacatcacgcaggatcagtttcagtgccgagccgtctttaccgtcagccacgatcgtatccggtgtggcggtcagttcggacttggtgatatccggatgcgttttatcaccgatgagtgtcacgttcaccgtggttgccggcagttcagtaccattgactttaaccttcacagccacaacacccgcctgagttcctttgagctcagctgtatatgttccgccggtgttctctgctgccggagtgacggagacattacccggatcggtaatgaacaccacattctgtccggtgatcaggttgtcgttggcatctttcaggatcagtttcagtaccgatttgtcagcgccgtccgcgacaatggtgtccggtgttgctgtcagctcagacttaccgttatccggattcgtgctgtctgcggtcagtgtgactgtggttcctgccacgttgaatgcattaccgttcagagtgacagtaatatgtgcatctccggatttggttcctttcagtgttgcggtatagatacccggggtgtcttcacgcgtgccgctgataacggtaccgctcagatctgctttgaacaggataccctgtcccgggatcaggttaccgttgacatcacgcagtgtcagtgtgagtaccgattcctttgtattatcagccacgatagtcgcaggtgcggcttccaggactgacttaccgctgtccggttttgagctgtctgcagtcagttcaacactcactgcatttaccgccagttcagtaccgccgacaaacaccttaaccggtgccgtaccggcaacagtgcctttcaggtttgcggtataaataccgtcctgatcctctgccgtaccggagatagtcacaccattcagtacagtggtaaatgtcaccgtctggccggaaatcaggttatcgttagcatcccgcaggatcagtttcagtaccgattcctgtgaattattcgccacaatcgttgccggcgcggcgctcatcgctgatttgccgccatccggattcgtgctgtcggcagtcagttttacaataaccggcgcaaccgcaaacgcttttccgttcagcacaattgtgattttggcgttaccggatttggttcccgtcagtgttgcactgtaagttccgtccggattttccgtcgttgtactcactgtgctgcccgtcaggtcagatttaaattccacaccctgagaagggatattgttgccgaatttatctttcagaatgagcttcagtgctgactcagtgctgccgtccgccacaatgaccatcggatttgccgacagcgatgatttaccggcatccggattagtggtatctgccttaaacgtcaccaccgcactcatttcactggtgttcactttcgcagtcacattaacctgcgtggccacggtattggtcatactgaataagattttgccgttctcatcagtcatcagtgactgtgacggcggctgtgcgctgttatctgcggtgaaaagaaccgccacaaacggcacaatgttaccggaagcatccgttacggtaacttccaccgcgttcttcgcttcgccgtttgccggcatgccatccgccgtgacagtcatatccgcaatttttgcggtggcgctgtcagcggtgaatgtcacattaacggatgccgttttaccgttcacctgagcagtgaccttcgttttaccggatttggtattcgtcagatcaaaaatggtttcaccattgccgtccgttgtcagctgagcctgtgacggttgagcattgttgtcagtaatgaactgtacggtgtagcccgggatacggttaccataagcatccaggacagtcgcctgcacccggtttaccgatgtgccgtcggctttctgaccgtcagccacgattttcagttgcgagtcagtgatcccagcggtggattcatccggcttaaacaacagctgtttagtgacactgctgttattaatgctgaaggtgtaatcctcagaaccggctttggtattggtgatatcgacacgcagacgaccctggttatccgtcattccgcttgccggctgagtctgataacgggcagttcccgggacactgatggtgaccggtgcacccgccagcgggttgttccggttatcagtcactgtcaccagtacactgtttttcgcctgtccgtttgccaccgcgccgtcattttcagtagtcacactctgaatttgtgcggtactcatatctgcgacgaactgtgaggtcacactcttcgaggtacctgttccctcaaccaccagtttggaatccccggcggtttcactgctgaagcggatagtgacctggccgttatcgtcagtctgctggttcggatcagtgactgttgcaccgttatccgctctggccgttaacgggaagttttccacctggttatcaaactggtcagtcactgttgccacggcgatatttttcgcctggccgtcagccactgctttgttattggttaactcaagggttttgatttttgcggtactgagatccgcaatatagatgatcgattccgcgcggctgttaccgttacgcatcttnnnnnnnnnnnnnnnnnnnnnnnnnnnnnnnnnnnnnnnnnnnnnnnnnnnnnnnnnnnnnnnnnnnnnnnnnnnnnnnnnnnnncgcctgcagtgatgctttaccggcggacttactgatgattttcacggtcgccgtgccgtccggcccggagatcacagtcagtgtctggccgttgttaccgtccgcatcataaatggtcacgccttccgggtttttcaggccggaaacactgaaggtgacagctttgttcgccagcacttcgcctttgtcattctgtaacagcgccaccgctgtgaactgatcacggttattcgccaccagtgactggttcggcgtaacggtcagcttggtgatggtttccacagacggaataacattcacccacatttctgcggtgttggacgggttgccttcgttatcttcaccaacggctgtcacgcggtagccctgaggttcaccgctgcggttagcaaagatataagccggcagcgtaatatccgccgtagtcagcccggtctgtttgatctcaccgccgtttgccagcagttcaggcgcagaccagcgcagagatttcaggccgtacttggctttcagcacactgaccgt

SEQ ID NO: 58 - DNA, 59119 bp, unknown
  Altogen 322075 strain
  misc_feature (10090)..(10090): n is a, c, g, or t
  misc_feature (20159)..(20159): n is a, c, g, or t
cttcacgcaacaagctgttatggatagccgggatgggctggacatttgacgccatggatgtcgggctgctggcatttctgctggctgccttacaggcagactgggggctgagtgccgcacagcttggctggatcggcagtcttaatgccgccgggatggcagtcggtgcctttgttttcggtctgatggcagaccggaaaggccgcaaaccggtgtttattatcaccctgctgctgttcagtctgggatccggactgaccgctgtcgccggttcgctcgctgtggtgctgatactgcgctttttcatcggtatgggactgggcggggagctgccggtagcctccacgctggtcagtgagagcgtggcccctcacgagcgcggccgtgtggtcgtgctgctggaaagcttctgggccgtgggctggctgattgcggcactgattgcctattatgttatccctgattacggctggcgtacggcgatgctgctcagcgccctgcctgcgctgtatgccctgtggctgcgggcaaaactgccggagccggtatcccgctataccgcacaggagcgcccgaaactcaccattgcacaatcgatggcactgatctggtcgccgcagtaccgccgtgccaccctgatgctgtggatcctgtggttctgtgtggtgttttcctattacggcatttttctctggctgccgggcgtggcgatcctcaagggattcagtctgataaaaagcttccagtatgtgctgatcatgacactcgctcagttgcccggctatttcagtgccgcctggcttatcgagcgttacggccgcaaattcgtgctggttacctatctcgccggaacagcaatcagtgcttacgggttcagttgcgcggaaaccgccacggcactggtcatttcagggatgctgctctcattctttaatctcggtgcctggggcgcgctctacgcctacacgccggagcagtatccggacagtgtccgcgccactggcgcgggaaccgccaccgcaatcgggcggataggcgggatcctcggtcctctgctggccggttatctgattcagtatcagtttgctgtcagctccattttcctgatcttcagtgcagcggtggttatcgccattctcgcggtcattttcctcggtgcggaaacccgtaaccgcgaactcagtaccatttaacatctgttctgacggcggttattccgccgtcagagcctgatgcagcgcatagttatcgctgtcattcctcccctttaccgcaacaggcgcgtataattcagccattatgtcactgccggatcgccggcgaaaaccgtaaaaagaaaatgaatcaatacgataaaatcagtaaatttctgagttatgtcctgcggcaccagccggactccatcgggatccgcctcgacaatgaaggctggacagatatcaccgtactactgcgtcaggccgctgctcacggcacaccatttgaccgtgaaacgctggaaaaggtggtggaaaccaacgacaaaaagcggtttactctctcatccgacggcatgtatatccgcgcggcacaggggcattccgccggacaggtggcgatcgattccccgccgcagacaccgccggatattctgtatcacggtaccgctatccggtttatcagtgatatctgtgaactggggctgattgccggatcacggcactatgtacacctcagcgcggatgaagataccgcactggctgtcggcgcccgtcacggcaaaccggcggtgctcaccattgccgccggggagatgcataaaaccggttatccgttctatctggcggataacggcgtctggctgacgccgcatgttccgattaaatacctgtcgcagaaaaaacccggctgaccgggtttatgcgttaagacgtgctgcatgccacgcgatatgatccgcgataaaactcgcaatgaagtaatagctgtgatcataaccggcatgcacacggatggtgtgcgggatattgtgtgtttcgcaagcggatttcagtaacccggttttcagctgcttactgaagaaggtatccgcaagcccctgatcaaccagcacatccgtcacccggtggccggattcaatcagtttcaccgcatcatactgctcccacgccgctttatcctctcccagataggcagagaaggctttttcgccccacggcacctgtgacggtgacacaatcggcgcaaatgccgacatgctgagaaatgcgtccggattacgcagcgccagtaccagtgcaccgtgcccgcccatcgagtgcccgcagataccgcgtttttccgatgtaccgaaatgtccgcttaccagggtgtgcagctcattcagaatataatcatacatctgataatgtgctttccacggctcctgtgtggcattgacgtaaaacccggcgccctggccgagatcgtactctttatcatctgccacctgactgccgcgcggactggtatccggcgcgacaatcaccagaccgtgctccgccgcataacgctgcgccccggctttggtgataaaattctgctcgttgcaggtcagcccggaaagccagtacagcaccggacatttctctgtttttgcctgcggcggcagaaacacggaaaaggtcatcggcgtaccggtcaccgcagaatggtgacgccagacttcctggctgccgccgaaacagacgtgatgttcaatccgttccatattatctccctgaatacgttatcagtaatgaatgacggtgcggatggatttaccgtcgtgcatcagatcaaaagcttcattgattttatccagtttcatggtgtgcgtgacaaacggtgccagctcgattttgccgctcatggcatcttccaccattcccggcaactgggtacgccctttcacgccgccaaacgccgtgcctttccagacccggccggtcaccagctggaacggacgggttgaaatctcttttccggcacccgccaccccgataatcactgactgcccccagccacggtgcgcactttccagcgccgaccgcatcacattgacattgccgatacattcaaaggtatgatccacaccccatttggtcatttcgaccagcacctgctgaataggtttgtcataatcattgggattaatgcagtctgtggcgccgaactgttttgccaactcaaacttggacggattggtatcgatggcaaaaatgcgccccgcttttgcctgacgagccccctgcaccacggccagcccgataccgccgaggccgaataccgccacagaatccccttcctgtaccttcgcggtattgtgtaccgcaccgatcccggtggtcacgccgcagccgagcagacaaacctgctccgcattggcctgcggattgatttttgccagtgagacttccgccacaacggtatattcgctgaatgttgagcagcccatatagtgatagagcggctgaccgttatacgagaaacggctggtgccgtccggcatcacgcctttaccctgggtttcgcggaccgcgacacagaggttggttttaccggaggtacagaaatcacactcaccacactcggcggtgtacagcgggatcacatggtcgcccggtttcacactggtcacgccctcgccgacctcaaccaccaccccggcaccttcatggccgagcaccaccgggaacagaccttcaggatcatcaccggaaagcgtgtaggcatcggtatggcataccccagtgtgactgattttcaccagcacttcacctttcttcggcggtgccacatcaatttcaataatttcaaggggtaaacccggcccgaaggcgactgctgcgcgtgatttcataacggttcctctgtgtctgaggcttatcatggcaggcgataagcacgaatgccgtccaccataccgcacaacagcgctgcctgtatagcgccggtcagcaggtggccgccgccggtgccggttttctgatcaacagacagattgccagcagcatgccgtacagtgccgtgccaatcagccacaccgtgccgtccgcactctgctgtgtctgactgaaaataaaggcaaacagcagcgggcccgccacgccggtcagattggtcaggctgaccagcacgccctgtaatttgccctgatttgctgccgatgccccggcagagataatgccctgcaatgcaggcagtgcaattccgccgcccgccagcaggatcaggaccggatacaccatccatccggaagtgatagctgacatcagtaaaaacgctgtggcatcggcaataaacccggcgaaaatgatggttttctcactcagccgttttgccagcgccccggcaaccaccgcctgaaacagcgcatgcatcgccccgagtcctgccagtgaaaaaccgaccgccgcactgtcccaggcaaagcggctctccgtaaacaatacccagacagtggccgggatctgcccgataagctgcgcggtaaaaaagacaaacagcaacagcgccaatggcttaagtaatgtgataaagctgatacctgcgctttctttttcctgctccgccggtttttcttctgtctgtaccgccggtttaaagataaaaaagaccatcagaaaggtgcaggcattcagtatcgccgcaatcacaaacggcagatgcggtgagatatcccccgccagtccgccgatagccggcccggcgatcagcccggctccgaaggccgcaccgaggcggccgaaccaggcagtacgctcactgaccgccgtgctgtccgccactaccgaagccgcaaccgcgccggtggcaccggtgatcccggaaataatccgcccgagatacagcatccacagcacattggacagtgccagcagcgtgtaatcaaacgcggcacccgccagggataacagcagcaccggtctgcgccccagcttatctgaccacctgcccagcagaggtgcaaagcagacctgcatcaccgcatacagcgccagcagaatgccgtaatggtttgccacatccgcttccgggagatattcccgcagcagtgacggtaataccggcatgatcaggccaattcccatcgcgtccagcagtgtaatcaccagcgcgatgacagcgggtttattcatttttcagatcctgtgttaattccctatcattgatagagttggaatatatccctatcagtgatagagtgtcaatctgaaaatcagaggagacggtcatggcacgactgaacagagaatctgttattgatgcagcactggaactgctgaatgagacgggaattgacgggctgacaacccgcaaactggcgcagaagctgggaatagaacagccgacactctactggcatgtaaaaaataaacgggcattgctggatgcgctggcggtggaaattctggcgcgccatcataattattcactgcctgcggcgggggaatcctggcagtcatttctgcgcaataatgcgatgagtttccgccgggcactgctgcgttaccgtgacggcgcaaaagtgcacctcggcacccgccctgatgaaaaacagtatgatacggtggaaacccagttacgctttatgaccgaaaacggcttttcactgcgcgacgggttatatgcgatttcagcggtcagtcattttacccttggtgccgtgctggagcagcaggagcatactgctgccctgaccgaccgtccggcagcaccggacgaaaacctgcctccgttattgcgggaagcgctgcagattatggacagtgatgatggtgaacaagcctttctgcacggtctggagagtctgatccgggggtttgaggtgcagcttacatcagcaccggggagttgctgataacgaaaaaaacgaaaagccgctgtaaatacatccctgtacactcaggcgcgtcatccatgacgcgcatgcttttcgtttccttttccgttatcgcaaaccgtcatcaaaaatacaaaaaccattatcgtccggcccggtaacgcagattcgccagatcatggccggacggttgctggtaaatatccagccggaaatattttgccgacgcattcacatattcaaatatctgcgactgggtttcctcataatcaacccaggtggtggagcgggtaaaacagtatatttcaaccggcaatccctccggtgtcggcgacatggttctgatcaccagatacatatccgcccgcacatcaccgcgcattttgatccagttaagaagatatttgcggaacagctgtaaattagtgaccccttttgcagccatccactcttttacgtcatcataaccggtattttccgccagtatttcatccagtgactgacgaaatgactcctgattccgcagttccgttaatagcgtttcatcagcaaacgatactgaggactgatcaatataaaaactgcgtttaatacgacggccgccggaagagaacatcggctgccagttggtgtatttttcggtcaggaaatcttttgtcgggatccttgagatcgtattatcccagttgcggaccgtaatggtgtgcagcgcaatatcaatcacttcaccgctgatattactgccgggtaattctatccagtcatacagtttcagcaccttgccgttggagaccagaatattggccacaaaggataataaagtgtgctgaaagacaaacatcagaacagccgcaacggcaccgaaaccggaaataataatcaacggcgactgtgaggtcattaacgcaataatcaggataaaggaaacaatccacaccccgattttagcgatctcaatatacccctttatcgagctgttacggtacgatgaacgcccggtatggcgcaggataaagatatccagcccgtcattgaccagtgaagccagattaataatcaggaatgcgctgcatacggtattaaacagaatattcatttctgccgaaaaggtcggcagcatcttattaatgtacagcaccagcgtgacagccacgacagaggcacttttcttggcaatactgtggatcatgctgtcgtcagtcaggttagtaaataacgacaacaaacgttttgccacgcgcagaaatataagccgcccgagaaaccaggtgaccagcagaataaccaccagaatcaccgctgataaaacggcgctcgcggtaataaaatcatataattcagataatttttccatcatatctcacagcatacatcaaaatatcagcgtatgagtctgacacaggaaaaatatatatgtttgattacggatagcaggggaagaaaagtacttcccccggcgatcagagaaccggtgctgccggttgtacggaaggtgtctgagggataacggcaccggcagcctcaatgctgctgttcagtgcctgctctgccttgcggatattttccggcttattcatcccggccatacacgcactgaccgtttttttcgccagtgcctgtgtcagtgcaaaattacctttttcccactcatcataatggcggatatattcctctttcgccagactgtggacatcacaggaaacatagtggctctcttttccctcaccaaaactgactgaaaaacgataattgaactgataatcaccgttatccagaccatcataaataagcttaaagtcaacaggatgaataaatacggatactttcccttttttatcttccgtggtgagtttatcaatatacgcggtcagttccggctgaaataaccgtaaagtcgggttaccgacggcggctatatccgtaccgcgaagctgttctttggaaaaaccgtgtgtttccccgccgacaaataatgatgatacaaaagaaaccgctgtcagccccaccattccggcagtatctgattttttgacaatattcagactgttattggtattgcttaactcactgtttattgttttgacttcaataagactgatactgagattatttttattcaccgtcgcgatggtacttttcgtttcagtcggtagtcttggcttatcagcacaccccgatatcactaacaccaccggtaataccacggctatcgaatatttcatatacatccccatcccgttaacgcaagaaaagataaataattatatttagtccgggtcataataacggttaagctgacaggggtttattattcatgtcacaaatcagatttttaataaaatcataaacataactacagataattatctgctcattttcagttaatacagagcgcggataagcttttacgtatttcattatgcagccacgatgtaaaaatccattccggactttctttttccggaactgacggaaataacagataatacgatgtgttatcggtaataaatccgccgggggcggtcagctgtcctgaagttaattcatccgccgccatcagaaatgatgcaaccgttattccctgccccgccagcgccgcctgaagacacatataaaaatgctcataagacaccgtccgcaaccggtgagaatcatccccggataattgctgccaggtctgccagacatccggccgtgtcgccggtatcagtaacgcatcaccggattctgccccggggcgctgcacccggccgataaattcccggcataatttcaccgcatgaatatccggacgccatttgaaatcattgcgccgcagcgcgatatccgccccggttttctgaaaatcaatcgcgccgcctgccgtgacaagccggacagtaatcgccggatggtgcagataaaaatgactgagacgcgggatcagccagcgcatggcaatggtcggctcacaggagagtgtgatgacattatcctgctgctgatgctgtattttttccactgtctgtgcgagctgagtgaagatccgccctgtggtctgaaacagcgtctgccccgccggggtcaggaataccgcacggttacgccgctcaaacagcgaaatccccagctcctcttccagcagacggatttgcctgctgacagcaccgtgggtgacatgcagctcttctgcggcacggacaaaactgccgctccgggcggcggcatcaaaaaagcgtaatgcggaaagcggtggcagtttcattatcgttatctgtgagaaaagctgacttatttatgacaggatatatcgtttttatccctttcacaaacgcctgataataaagccacagagacaataatgagaaaaataactctcattattccggtcagtttttatcagggatattcataatgaatgaaattattgcagtcgcggtgatcaccacactggcggtgatcagtccggggccggactttgctgccgtcacccgtaacagttatttatacggcacaagaaccggtctgttttcagcgctcggcattgcgtttggtgtgcagttgcatgtgatttatacggttttcggcgtgacactgttaatcatgcagtcaccggcgttatttaccgtgattaaatcgctggggattatttatcttatctggctgggatttaaatcctttaccaataaaacccggatcaccgtgaacaatacagataactccgccctgtcatcgtttggcgcattccgtaacggcttttttgttaatgccctgaacccgaaaaccatgttatttgtggtctcggtatatactcaggtgatcagcagtcataacacattaatgatgaatttcggctacggcgtgtttatttcctttgctcactggctgtggttcagcttaattgcgctgttcttttccaacccggctatccgtaataagatcctcagccgtcagcttctggctgataaaattatcggtgttttattaatgctgctcggtgtttccctgatttttttcacccttcactgataatcactgcccgccggttatttccggcgggaaattcaggattttttctgcggctcacagaccatatgccccggtgattccggattcagatcgcgggtaccgaagcggcggacagaataatcagagcggatacagtgataaacccggcctgatgcggcagaggataccgtaaaatcaatattccgcttaccggtaacggacggcgggttttctttaatattgctgatagtgagatctgantttttatattgctgatagtgagatctgacatatcccccgcctgaaaatcacggtgaatcgcagcctgtgcatgcattttcagggaatccggcgtatagacaggataaatattttcatcggcacatcctgccgctgataaaataatgagcgccgcggcgattcttttcatttctgctcctgtgaattctgttgtgctttttgcggatacatcaccggatgtgcggtacgccatgccagcgcctgtttttcactgagattatggcctttgaattcaataattctgatgcttttttcattctcattcagacgcagcatgcggaaacaccgatccggaaaaatcgagcccatcataaggtctgccatctcattattctcatcagaaggggctatccagtcaaataaccagatacggtcaccactgcgcaactgctgatacagctctgattcatcacatcccgccagataacgctgttccgtttccgcattcagcgccccccagctgaggaaaaaacagggctgatgattttccagtgccagcacatactgtttttgtttgataagcggcagcagcagctttcccagagcacgcagcggtgttttgctgtggcggggggagagcatccataaccagactgcggctccccagatttccgcctcactgggtttatcatccgccagaaacggggcataaaccgtgtatttgccgattttcatgtctcttccttttgcacagggtctgcgcagagagggtagcgtattacgggaagtcctgtacccggtatcatctgaaatccgccggtaccgcgatcgcacaattgtgataatcccgcatcgcgataagggatatagtgataatagttctcattacgatcacggacggatttatcatgctgaatacaccgcaactcagtctggctgaaatcaataataccgtgccggttgccggggcaaagtccggttttctgcgcaagctgtttgccttttccggcccaggtgcactggtggcggtgggatatatggatcccggtaactggatcacctcgattcagggcggggcgctgtacagttatctgctgctgtcggtgattttgctgtccagcctgattgcgatgctgttgcaggcaatgtgcgcaaaactcgggatcgtcaccggtcaggatctggcgcaggccacccgggctcgggtcgggccgaagctggctgcgctgttgtggatcaccactgaactggcgattatggcgaccgaaattgcagaggtgatcggcagtgcggtggcactgaacctgctgttcggcattccgctgatggccggtgtgctgctgacagtgctggatgtatttctgctgctggtgctgatgaaactcggtttccgcaaaattgaagcctttgtgtttgtcctgatcttaacgattttcctgatttttgcctacgaagtgatgctgtcggacccggatatgggtgcggtattgcgcggctttattccgtcggagaaaatcttcaccgccacactggccggacaggattctgccctgctgatcgggctggggatcgtcggggcgacggtgatgccgcacaacctctatcttcactcttctattgtgcagagccgtcagtatgaccgccgcagtgaagccgggctgcgcgaggcgatccgctttgcaacaattgattccaatatccagctcgggttttcatttattatcaactgtctgctgctggtgctcggtgcagcgctgtttttcggtaacgatccgtctgacctcggacgtttcacccagctgtacgacgcgctgcagaatccgggtatcgtcggcggtatcgccagtgccacgctctccacactgttcgcggtggcgctgctcgcctccgggcagaacgccacaatcaccggtacactgaccggtcagattgtgatggaaggctttattcatctgcggctgccgatgtggctgcgccgggtgatcacccgtggtctggcggtgatcccggtgattatctgtatttacctgtggggggatcgcgaggatgtggtggaaagtctgctgatttatacccaggtgtttctgagtatcgccctgccgttctccatgatcccgctgctgctgatgacctcgagcaaaaaaatcatgggggtatttgtgaactcgcggctgaccaccgtgctcggcggagtctccgccgccgcactggtgatcctcaatttacagttgatccgcgaggttgccgcaccgctgctgacattctgaatcagtgcggctcaataaccgccgcctcatagtaaggcagactccacggcccttcagggcggatattcaggcatctgccgctttcattacggtcacgcagcacaaacgtgctgccgttccagacatattgttccgtgctttggcaatccccgttctgactgcctttgagcacaacgcctatttccccctcttcgtaccaggagccgctatccgttatctgttccggcggggcacttttatcattgcggacaaccagcatcacctcaccggcatcataataactgcgccagcagtcagcactgatcagcgtatggttatcaccgagctgcgccatacgccagcgccactgctttgatacctcttcagtctgacaacggctgttcccgctgatataaggcagaaattcctcccggtaacgtgccgcttcctctgcggtcatgtcccgcagggcattttcccgggctgtcacccgggtcaccaccggaagcggaagcgcggcttttaccccggactcactctctgtgcctctgaggatcagcgcagacgatgtcccgctccgtccctgaatctcatccattttctgtaataccgctaccgcacccagcggagaaaacggataatcctgctcccttgtatgaaacacgacagatttatggtgacgcagggcatccgtaaatgcagaaaactgctccgtatccatctgccagatactttcaacagctccgtcatcacggggagaaacctgcaattcccccagtgtatgtgagtctatcatcagcaccggattcaccagcaacggtctggcgttttcctctcccagaatcaccaggtttgtgaccggtgtaccgggtccggccgggcgggtcagcagtacagaggccgccgggctgacatcctctgcggaataccctgccgcgcggcaggtcagggtattatcgcaaatcagatcccagtcatggtctgaatatttttccggcatgtttacctttgccgcaccggcgtactgcgtgacactcagtgccaccaggccggtgataatccattctttcagcatccgttgcttcagcatgttttcgcgttatctatttttgagaggtgagtcatcacggcctccagcacgccgccgccgatagcgcgggctttgtcagagaccgaacggaagtccgccagtgcaccgcgcgggtcaacgtcagcgattttaaacccttccggcacacacagcccttcattgagcaggccgcgtaccatgccgtccatcggcgagagaatttctgtgtcaccgatacgggcaattacatccccttcgtgtaccaggtcgccgatattcacatggcgcgtcatcatgccgctgtgcggtgcgcgtaacacgcgttcggtggttttgccgttgatattgcccggaataccggtattcggtgccgcgctgccgtgggtgatcacccgtccgaggtgatggccgcgctgagtttcaatcaccgcatcacagtccacaccggcctcaaagcccggtccgagggcaatcgtgcagggagccatcttgcggtgggtaccggcaacattgcgtttggcgataatggcatccaccaccacatccgggtgcagtgccggtaacagttcgccgtgttcgtccgccagcaccgggatagccccttctttcaggtagcggtttacttcatcaatatcatgagcatagcgggcacagacgccttccacgcagctttcgccgtcatagagcgcctgggcgaaagagaccgtacagcggatcacggttggtttgcagacatccagcattaccacttcaaaaccgctgtgatacaggcgtaatgccacgccggttgccaggtcacccgcgccgcggatcaccacccgttttgctctgcgtgcttctgccgggttctgtttcattgccccgcccggggcatcattcataacctgcagcagctcagccagaatactgaccgcgatttcatggggcgtttccgcgccgatatcatagccaaccggcgcatgaagccgggagagctgtgcatcagataccccggattcgcttaattgtttagtgaatgtctgtactttacggcggctgccgagtaatccgagggattttaacggtttatcgataaggcagttgagggattccagatcctgactgttggtggcgataatcacataatcttccggctgcggatccagctgattcaccgcatcggtaaatgaaggtacgtgccacaggcgggttgacggcgggaacagatccggctcaaggctgccggcatacacatccgccacatgaatatcgatattcaggaaagccgccagctgtgcaatggcacggttgacgtgaccaccgccgagcaggatcagacgcggacgcacaccgtgtaccgcgatatacaccgacatcgcgccgccgcagtcagagccgacagcatgctgcccgttgcgggccatccggccgtggaacatgcgggaacgcccttcgtgcagtgcgtcgaccgcctcttcaatcactttgcgctccaccatgccgccgccgatggtgccgatggtttttccgtctcccagcaccagcatttgcgcactgtggcggggggtactgcctgagcattcaataatttctgccatggcaaacgggcaatttttctcaaccaacttcgctgcttcggtaaaaattttcataaacagacctcaatggatatccctgcatttatcattgatattattgtcgctgcaatatatgtgtaattgcgggatcttccctgacggcaccgaaccatactgcgttcagcggagtgccgcggatccagtctgccagtatatccggcgaaaaattctcattttgagaaaagcggtttatcagccagatccgtaatgcgtccggtggtgctgatttccacatcccctgcggatgccggatcaggcggcttatcgcccccaaatccagcgtatcaccgctgtttaagccggtaacggcagagaaatgtgaccaccggtgaacattgtcaggcccgacgggagcccccagaagccggccatccgtcacagcaataacacaatcactgtaatcaggtatgcaaggttcatgctcagccggcgcttttatgccaaaaccgcgagctccgtcagcttcggctaaaataacatcaacggcattttgttccgccagggcgttaatatcggcggaggaaaagccgcgaaccttgttattcagcgggttccagccggtataacaggcaaatgagcctctgtttgtgaccgcatcaggcaggcggaccgggtgacaggcgagaatgaccgggaacccttcgcggggcagaaacatatgggtggtggtggtgatcatcacctttttccctaattgagaaaaagcctgtgccagccagaacagacagctggttttgccgcctgccccgacaatactgatcaccattgcatggccgcccggatgtgtatcacataaccggcgcagcggttcaggtatagtggcgcaacttcggacagggatctgtgtattgagggccgttgtcatcgtcattaccgaatcctttgaatatcagtcactttcaatatttatcagcggagtttatacccattatgccgtctcacccgacctcagccgataccgctttatcttatttatcagtccgggaaccgctttgcccgcaggaaacggactgcataatgacggcggccgggctctcctcacggatgggtgagtggaaaatgatgctgccgtggggcagcgacggtgccactctgctggataccagtctgtcgaatgcactgcgcttttgtcaccgggttctgctggtaaccggctttcgcggtgcggaactggctgcgcgttatcagtccgtaaaacgcattcagattctgcataatccggattatgaaaccgggctgctctcctcgcagcgtctggccgcacaggcagtgaccagcgaatactgttttctcacccacggtgatgtaccgtttctcacgcctgagatctggcagaccctgtgggcacagcgcggtgatgccgcactccttccctgttacaagcaagttccgggccaccccgtgctgctctcccgcgcatgtctgctcgccgcactgtcacaaccggcgggcaataccatgaaaaaacggctgctggccggtcctcacaccttcctgaatatgcagagcgatgaggttattaccgacatcgatacaccggaggcttatcagcagcattatcgcgggtaatccggctgtacactattacttccgtctcattaataacattaattgttaacgcacttttcccattatcaatgtgatacattttttctttttttgagaatcttattcacatgttaatcccatggtaataaagatcttttttattgattcatattctcatttagcactgtgcgagctgtttcacactttgacattaagattagatttgtctcacatttttttatttctctgaatacgaaatccgcagccttaaacaatcctggcgtaattgttgcaactgtgagtgcatacagttgcatgtccggcaccaccggcatgccccctcatattgcagcaaggagagttttatgggagatataatgcgtcccgtcccgttcggcgaacttctgaaccggatctttgaagaatataaggcgagccgttccatttttggtatcaatgaacggcagttttaccgcagagaacatcagcatcctctgatgtctgtcttcggtgaaacctgcgagacgccgatcggccctgcggccggtccccatactcagcttgctcagaatattgtggtttcctggctgaccggcggccgttttatcgaggtgaaaaccgttcagatcctcgatgaacttgagctcgaaaagccgtgtatcgatgctcaggacgaatgtttcaacaccgaatggtcaaccgaatttaccctgccgaaagcccacgacgaatacctcaaagcctggtttgcccttcatttattagaagcgatttttgacccgcgcaccaaaggcgaggcgaaatctttcatctttaatatgagtgtcggttataacctggaagggattaaacagccgcgtatgcagcagtatatccacgccatgatggattcctcacagctgccggtcttcgcgaaataccgtgaggaaatgaaagcctttatttcccgtccgggcttcctgaaagaactgggtctggaggatcgcaaagccgatctgctggccatgactgaccgcgtgccgggagatttatccaaaggtgtgaccctctccaccatgcacggctgcccgccggatgagattgaggctatctgccgctacatgctggaagagaagcacatcaatacctatgtgaagctgaacccgacactgctcggcttcccgcgtgtccgtgaaattctcgacacctgcggctttgattacatcgggctgagtgaagaatcgttctctcatgacctgaaactggatcgcgccctggaaatgttacagcgcctgatggatctggcgaaggaagtggatcgcggtttcggggtcaagctgaccaacaccctcggcaccatcaataataaagggcgtctgccgggcggcgagatgtatatgtcaggccgagccctgttcccgctctccatcaacgtggccgcgctgctctcccgtcattttgacggcaaactgccgatttcttactccggcggtgccagcaagttcaatatccgcgatatttttgaatccggtatccgccctatcaccatggcgactgacctgctgaaaccgggcggttatatgcgccagaccgagtgtctgcgtgagctggatgaatccgatgcgtggggcatgacgcagattgatgtgggtaaactgaatgcgctggcagaacgtgccgtcagcatggaatatacccagaaacactggaaatcagaccaggaaatcgacgccggtggcccgctgccgctgaccgactgttatgtcgcaccgtgtgtgaccgcctgtgccatcaaacaggatattcctgaatatatccgcctgctgggcgaaggccgctatgcggatgcactggaactgatttaccagcgcaacgccctgcctgccatcaccggtcatatctgtgatcaccagtgccagtacaactgtacccgcctggattacgaaagtgcgctgaatatccgcgaactgaaaaaagtggcagtggaaaaaggctggaaagagtacaaagcccgctggcacaaaccggccggttccggtgataaaaacccggtcgcggtgattggtgccggtcctgccggtctggctgccgggtatttcctcgcccgtgccggtcatccggtgacggtgtttgagaaagaagccaatgccggtggtgtggtggcgaatatcatcccgcacttccgtatcccgcgtgaaactattgagcacgatattcagttcgtcgctgaccacggcgtgaaatttgaatacggctgtgacccgcgtctgaccgtcgataaactgctggagcagggtttcacctatgtgctggtcgggatcgggacagataaaaacagcggcgtgaaactcgccggtgacaaccgcaacgtctataaatccctgccgttcctgcatgattacaacaacaatgcgccgctgaaaatgggcaaacatgttgccgttatcggtgccggtaacaccgcgatggactgcgcccgcgctgccaaacgaattgccggtgtggaagatgtgacagttatttaccgccgttcccaggcggaaatgccggcctggccggaagagtatgaagaagcggttgaagatgatgtgaaattcatgttcctgcacaatccggagcagttcaatactgacggtaccctgctggtccgcaccatgaaactgggtgagccggatgagtcaggccgccgccgtccggtggcgacagaagagaccgtcaccctgaaaatcgacagcgtgatcaccgctatcggcgaacaacaggattgcgaagtgctgtcacaaatcggcgtgccgatgggtgaggacggctggccggcggtgtaccgcaacagcggtgaaaccacccgcgccaatgtgttcctgattggtgatgtgcagagcggcccgtcctctatcgtggcggctatcggtgatgcgggtcgtgcgacggatgccattctggagcgcgaaaatatcctctctcactacagcgacaaatactggctcaatgtcgatccgcaggatatcactgaccgtaaaggcgctatcgccgtgcagatggtggacagcgacgaccgcgaggcgttcgtgaaacaggaagcagagcgctgcctggaatgtaactacatctgtgcgaaatgtgtcgatgtgtgcccgaaccgcgccaacatttctgtggcgattccgggcttccgtaaccgttatcagaccctgcacctggatgcgatgtgtaacgagtgcggcaactgtgcccagttctgtccgtggcagggcaagccgtacaaagacaaagtcactatcttcagtctgccggaagacttcgaaaacagcaccaacccgggcttcctggctgacggcagcacctttactgtccgcctggacggcaaagtcagcaaactgcagctgggtgctgacggggaattcagtcaggttcctcaggagctggaagagatgtgccgcatcatgagccatgtccataaacactatcgttatctgttaggccgggtggagaaataattatgctgattctgaaaaacgccaccatcgctgagttcgaacctgcgcaaatccgcgaaggggtcgatatcgccattgagggtgacaaaattgcggctggggggaacggggttcattcccgttacccgggcgcgntgggtaacgggcttcattcccgttacccgggcgcggaagtcaaagagatgaacggcaaactggtgatgccggggatcgtctgctcccataaccatttctattccggcctgtcacgcggcattatggcgaatatcgcgccgagcccggattttatctccaccctgaaaaacctgtggtggcggcttgaccgcgcgctggatgaggaatccctttattacagcggccttatctgctctctcgaagcggttaagagcggctgtacctcggtgattgaccatcacgcctcaccaaactatatcgccggttccctgaaaaccctgcgcgacggcttcctgaaagccggtctgcgcggcatgacctgctacgaaaccactgaccgtaacggcggcctgaaagagctggaagccggggtggaagagaatatcgcctttgcggagcttatcgacagcgaacgcaaaagtggtaaatcccgctatctggtggaagcacacatcggggcacacgcaccgtttaccgtggcggatgaaggtctgaaaatgctgcgcgaggcgattaagaaaaccggacgcggcctgcatatccatgcggcggaagacagttatgacgtctctttcagccacgacaaatacggcaaggacctgctgatccgcctgggtgagtttgatctgattgatgaaaaaactctgatcgcccacggcttgtatctttcttccgcagatattgagctgctgaataaaaaagatggcttcctggtccacaacgcccgctccaatatgaacaaccatgtcggctacaaccaccgcctgggtgactacaacaacgtggtactcggcacagacggtatcggctccgatatgttagaagaaatgaagtttgccttcttcaaacaccgcgatgcaggcggcgctatgtggccggacagcttcacccgcttcctgtggaacggtaaccgcttactggcacgaaacttcggcaaacagttcggccgcgtggaaaccgggtatcaggccgacctgaccatttgtgattacacaccaccaacaccgtttgtcggggataacctgccgggccatctggccttcggtctgggctccaacagtgtgaacagcgtgatggtggatggtgtgatggtgtatgaaaaccgtcagttcccgttcgatatcgaaccgctctttgcagaagcacgcaaagccgcgaaaaagatgtgggcccggatggacgcactgtaataaaaaaccatggcctgcggcactgccgcaggccggaagagcaatgtaggggtaacccatgatcgaacaatttttccgccctgccaccttaacgcaggcaactgagctgaaacaacgctttcaggaaaacgctgtctggtttgcgggcggcagtaaactgaatgcggtaccgaccaaaactgaccgcactgtcgctatctcactgtcactgctgccgctgaaatccatcgagtggcaggacggtattctgcgcatcggcgcggttgtcacgctggaaacactgcgtgaaagcccactgatcccgcgtgcgctgtatgacgcgctcggctttgtctattcacgccacatccgtaaccaggccaccatcggcggggagatcgccgcctgtcagcgcgaacatgcgctgctgccggtgctgctggtgctggatgctcaggttcagctggccagcaatgatgtgatcccgctggaaagctatctcgccgcaccggatgaccgcctgatcacccatctgattttacaggatccgttccgccgctgtgccacccgtactgtccgcgaaaccgctgacggctgggctgtggtcactgccgctgtcgcactgaccggcaataatgagcagcggatcgccgttgacggtgtcggttgcggcatcagccgtctgccgcaggttgaggcaaaaaatctcagcggggaagcgctggagaaagccgtcagtcaggctgtgaatccgaaagcggatttactgggcagtgaagaatataaacgctatatcaccggaattttagtttcagacctgctgacagactgccggcaaatgggggaggaataagaaatgaacgtccattttatacttaacggcaccccgcattcacccgattgcattccgggcgaaaacgtccgtaacattctgttcagcctgggtatgcactctgtgcgtaacagtgatgacggctatggcttcgcaggctctgacgccattttattcaacggccgtattgtcaacgcatcactgctgattgctgcccagctggaaggcgcagtgattgaaaccgccgaatctctcggcaaatggaatgaactgagtgatgttcagcaggcgatggtggatgtgggtgtgatccagtccggttataacgacccggcggctgccctgatcctgactgatcttatcaaacgtgttccggagccggatcgcgaccagattgatgatgccctttccggtctgttcagccgtgacgccggttatcagcaattctatgaagtcattgatctgctggtaaaacgccgcaaagatccgcactacaaagctgacagtgcaccggccttccgcgatgacctgacggttgtcgggaaagtcacaccgaaaaccgatgctgccgtgatggtgcaggcaaaaccgtgctatgtggaagaccgcattccggccaatacctgtgtcatcaaaatgctgcgcagcccgcacgctcacgcgctgatcacccgcctggatgtcagtaaagcggaagccctgccgggcgtggtgcatgttatcacccacaaaaactgtccggatgtgtattacaccccgggcggacagagtgcgccggagccgtctccgcttgaccgccgcatgttcggtaaaaaactccgtcacgtcggtgaccgcgtggctgctgtggtggcagaaaacgaagctatcgcactgaaagcattatcgttaatcgaagtcgaatatgacgtgctgaaaccggttctgtctatcgatgaagccaaagccgacggcgcaccgctggtgcatgatgagccggtgatttatgttaacggcgcaccggctgacctcgcagagcagaataagaacgcggcagatcgcggcgagcatttacagattaacttcccgatcggcgcgaaaccgtgcaaaaacattgctgcgggcgttcacggccatatcggggatctggataaaggcttcgcagaagcggataccgttatcgagcgcacctatgaatcccgccaggttcagcagtgcccgaccgaaccgcatatctgctatacctacatgaacggcgaccgtctggtgatccacgcctccactcaggtaccgtggcacttacgccgccaggtggcgcgtattctcggcctgaaacagaacaaagtgcatgtgattaaagagcgtgtcggcggcggcttcggctccaaacaggatatcctgctggaagaagtctgcgcgtgggcaacgtatgtcaccggccgtccggtctcattccgctacacccgtgaagaagagtttatcgcgaacaccagccgccatgtggcgaaagtgaaaatcaaactgggcgcgaaaaaagacgggaaaatcaccgccatcaatatggaattcctggcgaacaccggcccttacggtaaccactcactgacggtaccgagtaacggcccggcgctgtcactgccgctctatccgtgtgataacgtcgatttccaggtgaccacttactactccaacatttgtccgaccggcgcatatcagggttacggggcaccaaaaggtaacttcgccctgaccatgatcctggccgaactggcgaaagaactgaatatcgacctgctggatctgattgaaaccaaccgcgtgcatgaaggccaggaactgaagatcctcggtgctaatcggggaaggtaaaatgccgccgtcggtaccgcccgccgccagctgcgccctcggcccgatcctgaaaaaaggccgcgagcttatcgactgggattccccgcgcaaacaggacggcgactggaaaaccggccgcggcgtggccatcatcatgcagaaatcagggatcccggatatcgaccaggcaaactgtatggtcaaactggaatctgacggcacctttatcgtccactccggtggtgcggatatcggtaccggcctcgataccgtggtcaaaaaactgaccgccgaagtgctgtgctgctgtccggatgatgtccatgttatctcaggggatactgaccacgcgctgtttgataaaggggcctatgcctcctccggcacctgcttctccggtaatgcggcgaaaatggcggcagagaatctgcgcaggaaaatcctgttccacggtgccgcgcaaatcggcgagccggtggaggatgtcgtcctggctgctccgggtgtggtacgcggtaagaaaggcgaaatcacattcggggatctggctcatgccgccgaaggcggtaccgggtttggtgtgctggtggcaaacgccagttatatcacgccggactttgccttcccgtacggggcaaactttgctgaagtggcggtgaacacccgtaccggtgaaatccgtctggataaattctacgcgctgctcgactgcggtacgccggtgaacccggatctggccttaggtcagatttacggtgcctctatgcgtgctatcggccacagtatgtcagaagagatccgctacgacgccaaaggtgtgccgctgacccgcgacctgaaaacctacggcgcaccgaagatcggcgatatcccgcgtgacttccgtgccttcctggtgccgagtgatgaccaggtcggcccgtacggcgcgaaatccatctcggaaatcgcggttaacggcgcggcaccagctatcgccactgcaattcatgatgcctgcggagtctggctgcgtgaatggcacttcacgccggaaaaaatcctgcgcggcctgagcaaaatataattaaatcaaccctgccctcgccggttccggtgagggctttttgtaagcagaggagtcagctatgtcgtctgaacataccgtcaaagcggtacgcgggaagttcctggatatcacccgcgtagtgacctcgatggacgatctgcccgatgcagtccgcctgatcgatgacggcctgatgctaatccggcacggaaaaatagagtggttcggacagtgggaagacgggaagcatctgatcccggaaaccgtccgtgtccgcgattacacagggaaactggtggtgccgggctttattgatacccacgttcactatccgcagagcgagatgatcggtgctcacggcgagcagttactcgaatggctcaaccgccatgtgttcccgaccgaaaaactgtatcaggatattgattacgcccgtgaaatgtcggcgttttttatcaaacaactgctgcgtaacggcaccacgaccgcactggtcttcagtaccgttcatccggaatcggtcaatgccctgtttgatgcggcaagccagctcaatatgcgcctcatcaccggtaaagtgatgatggacagaaacgcgccggactacctcaccgacacaccggaaagcagttacgaagagtgtaaggcactgatcgaacgctggcataagaaagggcgtctgctctatgccatcaccccgcgttttgcgccgacctccagcccggaacagctggcagtgtgtcagcggctgcgcgaggagtatccggacacctgggttcacactcaccttgatgaaaacaaagcagaaattgagtgggtaaaagaactctatccggacagcaaaaactacctggatgtctatcaccactacggactgaccggcgaacgcagcgtatttgcgcactgtatccaccttgaggaagaagagtgggactgcctgcacgataccggctcggcggtggcattttgtccgacatcaaacctttatctcggcagcggcctgtttaatctgaaaaaggcgctggcgaaaaaagtgaaagtcgggattggtacggatgtcggtgccggaacgaccttcaatatgctgcagacactgagtgaagcttacaaagtgatgcagttgcagaaaacctgtttaaccgcctttgaagcgttttatctcgccactctcggcggcgcgcattcattaggactggataactgtatcggtaactttgccgccggcaaagaagcggattttgtggtacttgaaccgaccgcgaccccgctccagcagttgcgttatgacaactcacgcacgctggcggagaaactgtttgtgatgattgcgcttggtgatgaccgcacgatttaccggacttacatcgatggacgcctggtctatgaacggacctgacgcacaccaatgcagtgattaaaacacattttcatttcattctcggggtctgcaattatgtctgataatacaacaccggataactccggggcggcagcaaaaggcgcactggacgcgtactttaaaatctccgcccgcggcagcagcgtcaaacgggagattctggccggggtcaccaccttcctcgccatggtctattctgtcatcgtcgtcccttccatgctcggcaaagccgggttcccgccgggtgccatctttgttgccacctgtctggtcgccagtatcggctccatcatgatggggctgtggcaaaacctgccgatggctatcggctgtgctatctcactcaccgcctttaccgcattcagcctggtgctcgggcagcaaatcagtattccggttgcgctcggtgcggtcttcctgatgggtgtgatttttaccctgatttccgttaccggggtgcgaaactggatcctgcgaaatctgccgatggggatagcccacggcaccgggattggtatcggcctgttcctgctgctgattgccgccaacggcgtcggtctggttatcaagaacccgctggaaggtctgccggtggcaatgggggcatttacctccttcccggtcgccatgtcactgatcgggctggcggtaattgtcagtctggaaaaaatgcacgtaccgggcgggatcctgctggtgattatcgggatttcggttatcggcctgattgttgacccgaatgtcacctatcaggggctgatcgccatgccgtcactgagtggtgcggacggtaaatctctgatcttcagtatggatattatgggtgccctgcaaaccgcggttctgccgagtgtactggcgctggtgatgacggcggtattcgacgccaccggtaccatccgtgcggtggccggacaggcaaacctgctggataaagacaatcagattatcaacggcggcaaagcgctgaccgtggactccgtcagctccattatctccggtgcggtgggtgcttccccggctgcggtatatattgaatccgctgcaggaactgccgcaggcggtaaaaccgggctgacagccgtgaccgtcggcgtgctgttcctgctgatcctgttcttctcaccgctctcttacctgatcccggggtatgcaaccgcaccggcactgatgtatgtcggcctgctgatgctgagtaatgtggcaaaactggatttcgacgactctgtcgatgccatgtccgggctggtgtgtgcggtctttatcgtgctgacctgtaatatcgtcaccggtattatgctgggttatgtcaccctggtcatcgggcgactggtggcaaaagagtggcgtaaactcaacaccggcaccgtgattattgcggcggtgttagtcgccttctatgcgggcggctgggctatctgatcaataaacaacggtggttttattccttacggggcacgctgtgtgccccgttctgttatccgccacccggcggtacacaggtttgttattcatacatcagccttccctgtatatccgcaataccgattgtgacaatacatcctgcattgaaatgcagaaaatcggactctatcccgtcggaaaaaataaccccgttttccggcatctgtgattcaagctgtaatgtcatcgtattatcgaccgccccgaaaaccagtgaggttccggatgtccgtcccgggaaaggctcccgcacactgaactgcagccgcttttcatcccagccgatcccggcgcgcagcggatgagaactcccgccggtcacgcccagcgcaccggccagaacagactgtaaccagcccgtcgaaccgagccctgttgagacaatcaccccggaggaagactgggcttccgcctgcccgccgtgactgagaatatagcgggccgatgtgtgacttttcggcccgataaacagatcattgaccgccagcattttctgtccgtcattggtgaccgcctgtgcaaaactcaggactttcgacggcatatccaggttcagtgtccgcgtcaccacagaggccagctgcggcagttcaaaaggcagcagtatgccgtcccagcgttccggatccggattaaccgcaatcaccggctggccgttcaggtattttagagtattcgccaccagcccgtcgcggccgataatcaccacaatatcgcggtcagaaaactgataccccggcagcagcgtgcgatccggaatctgtacctgtcccgcctgcagcaaaatacgtttcgcctctgtcagctgcgcctggtagcgatcatgctccgcgagataatcactcacggagatgccgttatgctccagataaaacttcgcctgcggccaggtattgaaacgggcgatcagctcctgtaaccgggttttctgtgtgaccaggacaaaccgtacctcatcccggcggctcatgctttgctcccttttttcatcatctgactgaacatatccggcgcgatattcagctcaccgatttttccggcattctgtgccagagattcaaaggccatcgccatcagctgctccggcgccatccggctcagtgccagggctttgagattctccaccggcagctcacggtacgctttcattttggtttcaatggcatacgcatccgcatcggactgaacgcgctgattatccgcactgagagaaaccagtgtctgacgctgctgctcctcaccaatctccgccgccagccgctcctgtgccattgccgcctgttcacgcaacagtgtgcgttcgttttccagccgggattcctctatctgctgctcttttttctgcacagagagatcggtctccagctcagcttctttgatcgtgcgctcctgttcaacggaggatttacgccgcgcataaatcgcatcatccgcctctttcagcagggattcccgggcttccgcctcaagtgcgcgggccgtttccggtgtcgggctaatcgcggtgacagaaaaatccagaatggtgatccccagagcctcaagcgccgcctgctgtgacagacgtgactgcaccagcgccaccagcgactggctgagcaataatgcacggcgcagcggcgtggactggatctccgcctggataatggtttgtgccgcgcggacaatccggtcattcagtttcatcggatcgtcggtcgcgtaggtttttccgtcccggttgagtacaaagttaagcaccccggccgttttttccggtgcactgacctgaaaggagagttgcccctgaacgcggaggctctggaaatccgctgtctggaaattgaaaataaacggagtttcctgcgcacttaacggcagtgcggcaatcgatgtggtcgcactgttgtaccagaaactcagcccttgtccctgacttttgacatgaccgttcacggaacggataacaaatgtggacgggtcagctttaaagaattttaaattaaacatagtatcacctcattagtgtcgttatgacaataacgatatagtgacttattgacactattaatgtcaagctgaattagtgtctgaatgacatttaatttgcaatccggatttctctccttacaatagaatgacttatcccgatttcaggatgtgacgcaaatggatgaacaaacttacctcgccggttatcagcgccgtgattttttgtcgcccctggtgactgttgatgctgtgcttttcacttatcacaatgaaaccctgcatgtgctgctggccgaacgcgcagaacatccggagaaaggcaaatggggattgcccggtggttttgtggatgaggcacaggacaagactctggaagataccgtgctgcggaaactgcgggaaaaaaccggtgtgacaccgccgtacattgagcagttatgtacggtcggcaataatcagcgggataaacgcggctggtcagttacggtctgctataccgcgctgattgccatgcaggcgtgtgaaaaacagattaatacggttaattccgtcagatggataccgctggatgaagcggaaaatatgacgctggcgtttgatcaccagttacttatccgtcaggccagagcgcggctgcgccagaaatccctctactccgttgtaccgggattcgccctgccggaaacctttactctgccggaattacagcacgttcatgaaattctgattggtcagccgattcagaaaaaatcattccgccgccgtctcgaacaggccgatctgctgattgataccggtgaaaaacgggctgaacgcggccgtccggcggcactataccgcctgaaaccggcgtcggctgattaccgttttatccgtaatctggagacagacgaagaataataccgtgttccgccggtattatttcctgaccgcttccgctatcgtcagcagcacatccgggcttttgacattgggataaacaccgctgaacggaataacaatgtaacgtctgtttttgacagcttccaggtgagacagcgccggatgatttgccagccaggcttttttcttttctgccggtgaccagaccgcatcggcaaggatgatatagtccggctgtttatccagcagtgtttcaggggagacgtgaattcccgccatcggcatgtcgataaacacattttcgcccccggccagggtgataacttcggtcataaaccctttatttccctgtgacatcagggtgtcactctggctgtcgagataaaaaatcaccggtttacggggcagcggcggcagggattttacttgtgccagcgtggtatcgatacgggcaacggcggcatccgcctctttttcccgcccgagaacccgccccaggcgctgcaaatcaattttaatactgtcaaatccgctgtatgcctgacgttcgcaggcaaatgccatcagatagctgccgataccggcacgttgcagatcatcctgcccgcccatcgaagccataaaggcagaggaaaacccggccacgacaaagtccgccccggaggcgatcagtttctcggtggcggggtatttggccgaaaaaaccggaatgccgtgatagcgccctgatttcagcgcctctgctgaatcatcaatataactcacgcccagcatctgcggcccggcatccagcgccagcaccatatccgctgcatgctgattcatggcaatgatatgctgcggcggcgcgggtttatcccacagcggatcgcatttatttcctgccgcagcccctgcagacagcagcaacaggaccacactgacagcataccggacaatcttcatcttatttatgctccgccagcaacgacggtaccactcttccctgttctatctgttcagaaacaaacagatggatctcttccggcgtggtcagccggtaccataaattatccggatagaccgtcaccagcggcccctgattgcagggatactgacagtgagagcgggtcagcagtacaccgttttcgttttcaaacaggttgcgcgccgcaagctgatggcgcagctgcatcagcagggatttggctccccggcagacacagcgcggccccatacagaagaaaaggtgatagcggtacggcggtgttttctcccagttcgggttggattcagctttcggctcacggctgtttgactgcttttccagttccgtcatcacctcaccggcctgtttggcatctgccgcagaatccgccccggtaagtacacacaaactccggaacacccgcagttgcggatagtgcgctgctatttcctgctccagcgctgaggtcagagacatcagtttttcagcggattgcgccgggtctgtcagaaccatcagcagaacacagcgggtatccggtgtgaccgcttccttcagctgatgcaataccgccccgctgtccgcacagcaggcggtatcaccgggaaagcccttctcactgagtgacagccagaaatccgcagataagcacgcctcattctgcaacgtgttcagatacagtgtgacattctttcccatagctcagtatcctcagaaacggtaggtgtaacgcagttcagcggttaacggacgaccgaggttgtccactttttccaggccgttgctggtcagacccgccgggtaatcgcggtcaaacaggttttccaccagcagcgtgagcttatgctgctgcgcatgatccacatacagatacgcgctggcatcaaacacggtgtaatggccgtaggtatcaccgccggatttcagttcacccacatagcgggcagccagttccgcaccccactgttttgccggggcgtcataaccgatgcggccgcgggtaaagaactccggaatatcgttaagtgtcgcgccgtttttggtatccagccagttacgggtgatatccccggagacataccaggattcatcaaagttcagtttggtcgccagtaccacacctttggtacggatttcaccatcaccgttaacccatttatcgtatttaccgactttcactgtcgtgatcagatcattgatttcacgggcgtaggccgttgcaccgaactgccatgcaccgccgttttcccacttcgtcaggtagtcaaaaccggcttcgatgtttttactggtttccgctttcaggttggcatcaccgatggtttgcttactttcatctttgacatataactgctcagcgttcggcagtttaaatgctgttcccacctggccgcgtaaattgagcttttcattcacctcatatttggtgcttgccatccagacggttgcatcctggccgccttcaaagcgttcataacgcacgccgagacttggtttcagctccggtaagacagggatatccggccgcacctgtaaatacagggcattggctttcgcggtatccgtttcgatcttcatgacctcatctttacctttgtaccactggttatctgtcccgacgacaaactcattatccccgaacaggtaagatttgatctgtgcctgaacgccgtagtcccggaatccccagtaagaatcgtcattctggatatccacggagccgtccgccagatagcggctgcggtcataacgggtattccagtcattaagatgtgcacggattgagtagctggtatcctgcgtcaggaaatgctcaaaggaaactgtggccagatgatggtcacgcttgttcatcgcctgacggtggtggttcggggagaccatatccaggtcggcctgtgtgtactgatagaacccctgcaattgtgcggcatccgcaatagtctgggtaacctggacaccaacagatgtcacgtcatagccacgctttttctgaccgatcgtgccgttgtaatcactgtcgcgatatggctgataaccgtcagatttactgcgggttacccacgccatcagaccggttttgccgatatcgttatcaaacgctttctcgacgtaaccctctccgtaacggcctttatccgtatccgcgccgacactgaattcaccggacagtacctctgaggtcggttttttggtgacaatattaatcacaccgctgatcgcctgagtaccgaaagagagactctgcgccccctgtaacacttcgatgcggtcaatcgcaatcagcggcagagtatcgagatagatcccgccgaacaggcggttgttcagacggacgccatcaatcagaattaaggtgtcatccgggcggccgcccataaaggaatatttaccgtagccgtaagccccttgtcccagagagacatataatcccggcacatattgctgtaatacctggtttaaatcggatgacggccctgaacgctgaatttcctcacgggtaataacctgtaatttattcccgtagtcggccagttcattaacggtggtggattcaatggtcgaggatttaacaacaatcgtgtcatcattattcccctgagttccggcctgtgcacagaacgataacaacaccatggcggataatggtgccaatgcaaacttaactgatttcatacctttctcttttattattttgttgtgatacatgccgtgaagacagagtcaccctgactcagaaaaagacaatatactgaacaaattcaatgggtaaatatgagaatcgttctttttcccgctttgtgaatacggacagattcagcctcttttttctttaaattcctgtaggaagctgtgtcttttttgtttcatttgttaattatcattaatgaaaactatcacctcaaagccaataattgatatgttataacataacattttgaggataaaaacagataagaaaataaaaaaccgcaatcccctgtacacagagggttgcggcctgaaaaaatgcttaattaatatttttcgaagaatgactgaattttctgcggatcagtggtctgcgtaagagccagttgcagcaatactctggctttttgcggattcagtctgccggaagccacaaaaccgtatgcatcatcatccacttccgcgttacgtgttgtatagcccgtcggcacccggctggcgcggacaaccaccacgccctctttggctgcggcggctaatgcatcaaaaacgcctttatacatattgccgttacccacgccggcactgacaatcccggcgcttccctcttcccgcagggcttttaccggcgcatctgaagcattggcataattataaacaataccgactttcggcagttcgctgagtttactgatatcaaacaccgcaccggcctgacgtggcggcgcagcctgataataggtcactttgccgttatggataaatccggtatcgccggcattcaccgcttcaaacgcctgaacttccgtggtattcattttgaccacatcccgcccgctgatcaccttgtcattcatcaccatcagaacaccgcgatcagccgccgatttgtctgttgccaaaaccactgcattatagagattcagcgggccgtccgcgcccagtgccgtggacggacgcattgcccccaccagcacaaccggcttatgacacgatactgtcaggtcaagaaaatacgcagtttcctccagcgtatcggtgccgtgagtgatgacaaatccgtccgttttatcacaggtccggttgatttcttttgccagcgtcagccacaccttgtcattcatatcctgtgagccgatattcacaatctgctcaccactgagatctgccagtgctttaacttccggcacagcatcaatcagggcatttaccccgacttttccggcctgataaccggacgaaaccgacgattccccgcccccggcaatagtgccgccggtggccagaactgtcacggaaggaagtgcaaacgccggggtcataaagagagatatcaacgcggacagcagaatcttgttgcggtttttcatacctgaatactccgttgctcagtagaattataaatagccaattaataaatatagaactaattggatatttaaattctccttacagagaatattcacagcaagatgctgaaaatgagatcagaagcgggattttaaaacgatgactcagaagaagccattctgacctgccggaaagaaaacacgatgcaggtcagaaaacggaaagcaggacaaaaattacattaaacggcggctcagtgtctccgacggtttttcattaaacagacgctggtagtcagtggcgaactgccccaggtgccagaatccccactgcattgcggcgtctttgacggtggtctgttttgaatacgggctgaccagttcacggcgcaccgcgttcaggcggatggttttcagataggcattcgggccgatccccagtacctgctggaaggcattctgcagcgtgcggcggctgacatacagctcattacacaattccagcacggtcaccggttcggtggcgttttcaaacaggtattcacgggcttttgagaccagtttcaggtagttcacgcggttggtgtagtgctcatcggccacggtgctggcatcttccagcaagccgaggaatgctgtcagcaggttatgactcaggacacggctgacggtacggttgcgttcctgctcaattttggagtgccagagggcatggcggatatactgccagatcgcctcttttttgaaggggttcacacccacagccggattttcgctgagcagattcatcagccgctccggattttgcagcaccacagagtgctttttcaggatatcgtgagaaatcaccagcccctgaatgtgatagtcatccggcgtgctcagttcaaattcttttccgcccggacgcacggcgattttctgccggcacagcatctgattaccgatataaccggtattctgctgctcccccggaataccgaaccagaaggcattcggccagaccatacaggactggcgcagagacagattagtgtattcgtggaacacctgaagcccgtcaaacagggtttcggtcagttccccttcaaaccggcccggcgtcagctgatcataaagctgctgccaggcggtaatagcacacgcctgatcataggcatcatgcgtataacgctgtgtaaaattctgctcgatcacgatagggctgagatcgcggtcatgcggcacttcatcattaaggtgatgtaaatctggtgtgatttttttcatcattattttttccccaaaatgaacggccgccataaatgttaaccagcgaccaattgctgccagaaatcgggatgaggattcggtacgaccatgctgtaaaccagcgcacctttatctgcggcgacctgtgatgcggcttttttggcggtttcgacgtctgcgacatcgccgctcatcacaaagtaacatttacccccgataccatacgccatatgaagacggattaacgtgacgccggctgctttaacagcaaaatccgccgcctcaatgcaggtcgcgacactaaaggtttccaccacaccgacggcttcacgggcattcacatccgtcacaccaccaatagccgggagcacatccgggtggatattactgagcagaaactcatccactacctgagcgccgcctttctccacaccgcagcgcattgcctgctgtgcggcggcaacatcaccgccgaccatcaccacatatttgccgggacacacggttttgcccatcagcagggtgacttccgcacttttgagcataaaatcggtgacttccatccctttggcgatactggacagttccaccatcgcaattgcactgtgcatagttattccttctctatcgtgacagccgtgctgtcaatatgacgaaccacgccgctgatactggcgtgaaccggcgctcccagtgctttttccgggacagcggcgatcagcatacccgccgtgacgttatctccttcgctgacaaccggtaccgccggggcaccgatatgctggcgtaacgggataatcacctgctgcggcgcgtagatctcatcagtcatcggcgctttgtgcatgtattccgtcagttccagacggcggacgaggcgtttgaccggcagcatgcggtgctgagccatcggatcttccgggcgcagttcaccttcatagcggatcccttcttcgcgcagcttcactttcagcatctgattgagacgcatcggtgagatttctaccgggcaggaccaggcttcacaaatcgcacactccgagcaggtcagtgccgcaacgacggctgacggcgcggagatctgctcataccccaccgcgcggacaatcaggtgcggcggcagttcgtggccgatcatgtgacgcgggcagagctcggtacacatgccgcactgttcacatacggtacgcgcctggttgatcacggtgcgctccgaacgggtccggcgctgaattaaaatatggtcatccggcaggactaataagccgccggtggttttggtcacagcatcatcaagggatgtctgtaatttgcccatcatcggcccgccgttgatatacgccgggttgctgatggtggagccgcctgccagcgccagcacttcacgcagtgtggtgccgaccgggacagaaacggtaacaggatgatgaaccgcgccgttcaccgtcaggacacggtgtatcacggcctgttcctgttcaacggcatacgcgacattgatcagggtctgcacattactgaccaccacgccgacagacagaggcaatgccgcaggcgggacccggcggccggtcgccagccagatggtgatcacttcatcaccggccggataaacatccggcaggatatgcagacggacagaatccggcacgcgggcattcaggatatcaatggccgcctgatgcttgcctttgatggcgataatgccctctttcgcgccggtggcccgcatcgcatacagcaaaccgcggatcatcgcatccgcctcacggacagccagttgctgatccacctgcaaaagcggctcacattcagccgcattcaccagatagatttccgcctgtgccgccagtttgacgtgggtcgggaaccccgccccgcccgcaccgacaacccctgcatcctgcacacgctgacgaatgatttcgggcccgcactcatgcagacccggcatcagattactcatcgcggtttccctcctgttttacccggtagcggctgccgcgtttgcgcagttttccctgtttaaacaggttttccagcacatcgcggctgtcctctatcaggcagctgaaatgcatggccgcttctccggcggtcacgccgtggcggtgtctggcttcagcagcaaagatcatcatggcatccgcatccggtgcagcggcagacactgccgtcgctgccggagccggttcagacaccggtaccggtgccggagactgcggttttaccttcaccggcacaccgctgaaaccggtaaccagccactcggtatcaccatccggacgaccgataaccttatggccgatcactttaccggtacggtttgcggctgcaatgcccgcatccaccgccgcacggcacgccgccagatcgccctcaacaacaagcgtcaccatccccgggatcaccatttcatagttaaggatgcggacattggccgacttcagcatcgcatccgccgcatcaatgccggacaccaggccgtatacctcaagtaatcccagtgaatcgatcatgacctatctcctgtgttaatgactgaactgactatacccttattcattcagaccgcaggttcgttggctgcatcctgaatgacgtcgggtatccccggactcaggcgcgctgaatagggttgcgcgcgatatccagaacggcttcggtaaaggcatcacatgctgctttacatgctgcctggctgccggtcaggaaggctgctgagtagttggtttctgacggaggcggcacgtaagtggccagctgcacgtcagcggctttcagtgcggcatcgatcccgaaggtcgcttccagcggtggtgccaccagatacgcaatcgggtcaccgtgtttaactttgtcaccatcagacaggtaagagccggtacgggagaccagatgcgccaggaatgcggtatcttctttgtcattcgcccactggaatgccgcgccggattcgatattggcgaccatggcatccagacccgcgcggacttctgccgggttcggaccaccgaggataatcatcacttcaccggaagtcggtgatggtgagtttgacgcccctgcatacagggaacgtccgtaaaccacttccaccagagcttgtttggtggcttcgtcagcggcaatgtaagcaacatcatcggagtctgcggtgataaggccgaggctgcggatgtgtttcggtaatttcagttcacggcagaaatcttcgtgtgcattagcgataagacgcatcgctgtcacgctcggccggataagatctaatgcaggcatattcagttccccgttaacggttcatgttgataccggacgctttctgctccagcatgcgtttggctaaatcgacgataacagcggcggcttccaccggcggtgtccctgcgcggtgaatgttcgagatacaggtacggtctgcttccacggtacccgccactgtcggtgagtacaccgcgtagcaggagaggctttcagactgacccagccccggacgttcgcccaccagcaggataaccactttcgcgccgagcacttcaccggcctggtcttcaattttcacgcggccgtaacggacgaagaacggtgtacccactttcagaccggactgctccagacctttcatcagcggcggcagaatttcgtcgtagtttgcggtaatcgcatcggtggacagaccatcagagataatgacctgcacatccggcgcctgcacacacttggttttcagcagttcgatggattctttattcagaatacggcccatatccggacgggtcagatactggtttttgtctgtgatttcagactgtaactccagcaggttctgttttttcacccattccgccgggacttctttcagtacggtatctttggagcgcgagtggtctgccaggaagcgcagcagactctgggtgcgcgggcgcacaccggcacggccggagcagacacgggaaccggtactgttacgcagttcctgtaacacttccgcacggtgcgggttctgcacgccgatccactgttttgcttccggtgaaccgagatcccactcaacggactcaacagacgtattaccctgattcagtacagcctgcgttgccgcggcaactgcctgtacgttttcgcccgtgtgtcccatctgagccatcacgctgcgtacgatgtcattaatttgtttttgatccatggtgatttaccccgaaaatcagaagaacagtgacggatcgccggcacgattggtaagacgcccgttttccatcagacccattttttccagccaggcttcgaattccggcgcagggcgcaggccgagtaactgacggatagttgcgatgtcatggaacgcagtggtctggtagttgagcatgatgtcatcacccagcggcataccgatgatgaagttacagcccgcagaggccagcaggatcatcaggttttcgttgaggttctgatccgcatccgcatggttggtgtaacagcagtcacagcccatggagataccgctcagtttgcccatgaagtgatcttcaagaccggcgcggatgatctggcggtcattatagagatattcaggtccgataaagccgacaacggtgttcaccatgaacggatcatagtgacgcgccaggccgtagttacgggcttccatggtcacctggtcagcaccgtagtgagcgcccgctgacagtgcggagccctgccctgtttcaaagtacaggcagttaggaccggcgatacggttgtactgcgcaccgacgtggcgggcttcatccagcatttccagctcaacaccgaactcgcgcagacctttttcactgccgcagatgctctggaaaatcaggccgcccggcgcaccgcgtttgatggcttccatctgtgtggtgacgtgtgccagtacacaaccctgagtcgggatatcgtatttatcaatgatgccgtagacagcatccagcacgcggctgaggttatccacatcgtccgttaccgggttgacaccgataaccgcatcaccgcagccgtaagagagaccttcataaatctgtgccacgatactctgcacttcatcacgggtatcgttcggctgtaagcggccgctgaagtggcccggcagccccatggtgttattcgcacgtttcacgacaggaattttcttcgcgccgtaaatcaggtctgcgttggagcagatttttgccacaccggcgatgacttctgaagtcaggcctttgcgcagcagattgatgttatcgagagaggtggtgtcgctcaggacatgctcacgcagctcaccgatagtccagtttttgacccggttatattcggtttcgttgatatcgtcctggatcagacgggttacgcagtcttcttcatacggaacgacagggttgttgcggacatccgcgatagtcagttcagacagcacttgttttgctgccacacgttcctgtgcgttacttgccgcgacacccgccaggatgtccccggagcggagttcgttagctttcgcgagaacgtctttcacgtcccggaactggtaggtctgaccaaacagcgtggttttcaatttcatattacgttccctcaggaaggaaatgcgagtgatttaacagtaacagggacgacagagccgctgaataacggcgtgccgatgtcgatatagtcgcctgtgtgcgtgataacttcgtcgataacagccagttcgcggccgttcatcagcggacgcagcagcatgcccagtgccttaccgaaatcctgtcccgcaatcaccagcagcggcatggtgttcgggtatgttttggtaaagcgttccagggcatcaatacagctttgtaccgaggcgtagttagtcggcagtgattccggtaaggccagcgcgtacagatcctgctgcggattaagatccatctgcgtcagggcacggctccaggtattcaccagatcttcatcatccgcgcggcccagcgccggatgtaccaccggaatattgcggaccggcagcgtgatgctgtccagccagatggtgctgccggacagggacagcgtatgcgcaccggcgccgatcaccgtggcacggacagtctgtgccggggtctgcatcggtaaagcactgaaatccgcattgcggtgtatcgcctgtgccagcagcggcccgatatcaccgaaacggaaatcattaccgctttccggattgctgtaacactccccgacaccgccggacagtgtgaccgcataaaaagaactttccgcaggcaggccgtccgtcatcagcagctcacgcccgagcggggtgaggttgccgctgatcacttcatacagcagctcactcatgcggtcggcaatggtattcagctgtgccggtgtcagggacatcggatcggtctgctcaccaaagcagtcacgggcgatcaggcggcccggcgcatgcacataagtaacgcgtccgctgctgtctgtttcgaacagacggccaccgacgttcagacaggcggaactgatcacatgaccggcttcgaacagcacgtagtttgctgtgccgccgccgatatcgatgttcagtacccgcgccatcttctgctcagagagtgtctgggcaccggatccgaaaccggcaatcaccgattccaggtgcggaccggcggtggcgaccacgaaatccccgagtttctgggataacgccaccacagccggacgcgcattgcgggttttggcagtttcaccggtaataatgatggcaccggagtcgatcgtcgccgggtccatcccggcggcggcgtactgatccagcaccagcgccagcagctcttcctcacgcaggtggccgtctttatccaccggcgtgaacagaaccgggctctgccagataattttgcgatccacaaactcataacgcggcacctgtgacaccgccgcgcggtttaccagagcgagacgggagaaaatcacctgtgtagtggtggtgcccacgtcaataccgacacttaagagttcgagggttttcatgcttatttctcctcagcgacgctttcagcagcagcttcagcggccgcagcggcatcttcctgctcaatatttttcggcatcatcatgatggcaacgaaaatcgcagtgataccgccgataattttccctgcaatcatcgggaagatcatcggtgccatgttagcggccacaaagcccaggtggtcacccagtgcgaaggcagcggacacggagaacgcacagttgatgattttgccgcgggtatccattttcttcatcatgccgaacatcgggatgttgttcgcgagagtcgcgatcataccgcctgcggccatgttgttgattttcagcaggctgccgatcttcataaaggatttttcaaaccagcgggtcagcagcagcaccatcgggtatgcccctaacagcaccgcagagatagaaccgataacttcgatggcgcgcatcactttgcccggcacatcaccttctgccatgaaaatcggatccaggcccggaatcaggttccagcccacagtgaactgcgccacagctgcggccaggccgatagtaatgatggcaacaaggattttggcgaagatctggaagccgttgatcattttctcaggaataaatttcagaccgaggcacaccagcgccgccacgatgatcaccgggatcatattgaccagcagcatggtcatgctgaagtccacgacctgaccgtcaatttccacaccggagaatttcgccaccagaccaccggcgatacagccgaccggaatggtcacgataccggccagcacaccgagtgccaggaaacggcgatcttttttctcgataatgcccagcgcaacagggatggagaacaccatggtcgcacccatcatggatgccagcagtacgccggaatataaccacgctgccacatcaccgcctgccagctctttcgcgaggaagaagccgcccatatcgatagccagaatactgcccgcaaacactgacgggtttgcacccagcatttcatacacaggaataatcaccggcccgagcagcatggcgatcaccggtgccagcgcggtcataccgaccattgccagacccagcgcacccattgccataaagccttcttcgaactgttcaccggaaccggcaatgcctttcccgactttacccaggccgattttaccgaggattgcctctgagccaccgaactggctgaagatacgatccacggctgctatcagcataaaactcatcatgatgtacatgatgatttcattaatgcccatacccttctccttccgtgcctgtcgcgcaggctgttcttattgattgactcaggctgactcgtaaatcgccgttatctgagccgctgtgaccgcgcgcggattggttttgatgcagatatcctgcaatgccgctttggcaaaaccatcgaaatcctcacgttttccgcccagggatggcagcgtctgcgcgagttccacgtcactgatcagttgttccacggcctcaatggcctccatgtcggtcatcggccgctgagtcagcgcatgaccaatttcgctgtacgcctgtttgcagaccaggcggttaaaacgcattacctgcggcagcatgacggcattcgccttgccgtgcggaatgttgtatgccgcgccaatctgatgcgccatcgcgtggcacagccccagaccggcattggagaacgccatcccggccatataggaagccagcatcatgtcctcgcgggctttaatgtcatgcccctgaccgacagcgatcggcagcgcgtggctgatcatggagatcgcccgcagtgccagcgcctgtgtcagcggcgtgacgttgctcgccacatacgcttcaatcgcatgtgttaacgcatcgataccggtcattgccgtcacatgcggcggaacaccgagtgtcagacaggcatcaataatggcgagatcaggcagtaactggctgtgtgccagcaccagtttgatatggttttccgcagtaataatcacggaaacattggttgcttcagagccggtacctgcagtggtcgggatagcgataaacggcagacgcggattgagcgccgcacccggcatcatatccgccagcggcagatccggatttgcagccagcaccgccacggctttcgccgcatccagcaccgatccgccgccgagggcaataatgccgtcacactgcactttcagcagatgctcaacggtacggaacacatctttatccatcggctcgcccggcgggcacggccagatttcatacgcaatgccgctgcggctcagattgcgctccagcacatcggtcagaccggcctgtaacagcatgccgtccaccataataaaaacgtgcttaattccgcgctccgcgagcacatccccgctgcggccaacggcgcccgggccgattaacgtggtcggcgggacagaaaactcacgcacctgacgggcattcaccaaatcaagcgcctgatagatagcggactgaacctcagccgcgggtaaacgattatccggcatgacggttttctccctgagacacaccgcagacggcaatcgccagcggcgtcataaaaatagaatgctgtggcagtaccacggtaagatgcgggaaacgcgcctgaaacagcggctgcacaccgggctgcatacaggagccgcccgccagccacagttcggtcacgtcctcaccgcgaatatgatcgtcgacgatatccgtcattttttcgtataccggacgaataaccggccagatgctttcaccgcgctcacgcttcatctgctcggcatcttccagctcaatacgctggttgcccgccagggtcagggaaatatgatggccgccggtggcttcatcgccggagcgggtcacttcgcccttctgcacaatcgcgatcccggtggtaccgccgccgatatccacaacagcggctttatccagccccatcatgtcagcgaccgcagacggctcatccagcactctggcgaccaccagcccggcggattccagcacattcacggagatacgcgggtctgttcccggcgggaatgacgttgtcgccacctcaaaccggaaaccgaactgtttttccagcgcatccagatgtttattaacgatttttaccgcaccgaagaaatcccagaccacaccgtcgcgcaccacatctgcccagtccaggcacaccgcgaccggctgaccttccgcattcaccaccatggacaccacatcacaggtaccgagatcgatccccagccacagcggcgcatctttgtgatcacccgcctgcggctgattacagatttccgctgcccgctgtaagcgcgatgccagccattcctgattgcgttgaaccatcggttcctccggtttaaaacataacgtcagggttaacgtgaacaactcacactaaccgggaaaaaagcggtgaagcccgcaggcctcaccgcagcggcttacacgatgcggaatgaatccaccatggtgcagcggcgcagacggacaaacgtccgcgcacaggtcacaccttcaccggtcggtgtggtgatcgtcatggttgtccagccttcgccgcccagtcccagaccggcaatacacggtccgtttttcacaaaaatactggtgtcgatggcattggccatgcggttcaggttgctgatgttattggaatgcatcgctgcggtatgatggcagccgccttccagtttcaccgccaggtcaatagcctgatccacatctttcacgcggatgatcggcagaaccggcatcatcagttcggtgacggcaaacggatgtttgcagtcggtttccgcgatcagcagacgggtatccgccggcacagtcataccgatagccgcagcaattttcgctgcatcacggccgacccagtcgcggctgacagtgccgtggccggtttcatcaacattcttcagcagaaccggaatcagcttctcgctctgttcgcgggtcagtaataccgcgtgattacgctgcatttcggtgatcagtttgtctgcaatgcagtcaaccgcgatcagcactttttcatccgcacaaatgatgttgttatcgaatgatgcaccgtgaacaatggctttcgccgcacgttcgatatcggcagtttcatccaccacgaccggcgggttaccggcaccagcagcgatcagacgtttgttggtgtgtttgcgggcggattcgaccaccgcatcacccccggtcacgaccagcaggccgatccccggatatttgaataaacgctgtgcggtttcgatatccggtttggcgacagtcaccagcaggttgttcgggccgcctgcggcaacaatggcttcgttcagaatcgtgatggtgcgctgtgagacttttttcgctgccggatgcggcgcgaaaatcacactgttaccccctgcgatcatactgatggcattgttgattgccgtcgccgccgggttagtggatggtgtgacagaggcgataacaccccatgccgcattttcgattaaggttaaaccgtggtcgccggttaacacttcaggacgcagacactcaacacccggggtgccgtttgcctgtgctaagttcttcgcgagtttatcttccacgcggcccatgccggtctcttcaacagccagaaccgccagttcgcgggcatgttctgttgccgcacggcggattgcgccgatgcagagattacgcatttcaacggtttttaatgatttctgtgcttctttggcggcaagaacggcatcatccagggattcaaacaccccgaaaccgttattctgtgaggctgccgcctgctgtggtgccgctgatgcagccgccggttgtgtgcccgcactcatgctggccagaaccgcttttaccacattctcaatttctttctgatccatattcacccacgcctctttctgtgactcgttgcggcgatttatttatgaaaaatcacctgactttccataacggcctcatccacaatgccgatgatgctgagatcgaccggtgacgcttctttgctctgagcacgccgcgccgaacttccgctgacgatcagcacccattcaccattacccgcaccgatactgtcggttgcgacggccacctcaccgttaggacgcccctggcggtcaatcatttccaccagcagtaatttgtcggattccagtccgggatgacgcacggtgcacacgatttgtccgataacgacagccagtttcatgttcacctctctttatatttcagcagcctgaatacagccggctacggatttcaggtaaaaaaatcccctgccgtctgagtgacagcaaaaaaaccggggagattaaaatcgcgtggcgtcagaagcacgccacgctaataacgattaatcgattgatttatcgccggacattttgataggaaacacttcttccagatcgccatgcggacgaggaataacgtgtacagagaccagttcaccgatacgctgagctgctgccgcacctgcgtcagtcgctgctttacatgctgcaacatcaccgcgcaccatggctgttaccagaccaccgccgatttgtttaacaccgactaatttaacgcgtgctgctttgaccatcgcatcggatgcttcgattaatgcaaccagacccttagtttcgatcagtcctaatgcttccatgatattttcctctcattgagatcccatcagggaccggtttaaataacgctttctgcttcagtgcggcggacaggttgtccggcctgagctaactgtgtttgtgctaccagcaccagttcaataatgtcgcgggcattacagccgcgtgacaaatcatgcaccggtgcatttaatccctgaatcagcgggccgagtgcccggtaaccgccgagacgctgggcaatcttgtaaccgatattgcctgcttccagtgacggaaagaccatgacatttgcccgcccctttaactcactgttcggggctttttgcgcagcgacacttggcacaaatgccgcgtcgaactgcagttcaccatccgcctgtaactgcggggcgcgtgcatgaataatttccaccgcctgctgcaccatcgccacattaggatgtttcgcgctgcctgctgttgaaaaagacaacatcgccacacgcgcggtttcaccggtgattgccgtgaaggtttccgcactgctcagcgcaatatccgccagctgtgcagaagtgggttgaggtacgacactgcaatcagcgaaacccagcacattgccttccgttcccggcggcaacatgatgaaaatagatgataatgttttcacgcccggcttcaggccgatcactttcagcccggcccgcagaacagcggcggttgacgagatattccccgccacacataaatccgcttttccggcggcaaccatggcggcaccgaaccacagcggctggcgcatggcctcatccgcatcttccggggctttttcgccgaggcgcgcggtgatggcatccgcaaactctgcacgccactcatccgcactgtccggatcaatggtgctcaggccgtccataatgacaccggtacgcagcgagaaatcacgcagcgcaaacgggtttgccagcagaacgggctccgccagaccattttgtttcagataacgggcggcgtggatcacgcgctcatccagcgcatccggcagaaccacccgcggcgggttcagttttgcctgctgacggcatcgttcaatgagcatgtgttcccccttgcatcagagcctgtttcagagcctgtgtggtcattacgccgccttcgcgcaccaccatcaccatcaggacatacaccgcactggagaggcgggtaagcgcctgcataatgtcagggcggatgacctgaaaataacaatcgatataaatacgtgccgcactgacttccgtttcacggactttggtccgcagcaggttcagcgccgccgcatcacggccgtgactcacatccggaacgatatggtcatgacccaggtatttcagcggattatgagacagcttgtgcagctcatccgcgttcagatccgcaatactctgctcaccgagcggttcattgagcgcatcggcgcgcataatattgccgagcacagagcggatatccgccagccagcctttcagcggtgtctgtgcaaattcagtctgtaaccagacggcttcggcgatggtggcatccagcgcggcgcggaacgccagacgcggatcatttttcgccaccatggtgtggccgttaaggtgtgtcagcgtgtccggctttttcgccaccggctgatggcataattcgcaggccgcaacatccgctttatccttactggttaacccgtgtaccgctttcaggtcagggacagccgtttcggttttaccggattcatccggcgtttccacaaacagacgaccttgtttatcctgaaatttcacctgtaaacggcggctttcgatcagctcgcgggcggatggtgtcatccggctgtcagcaggcagatgaatttcactgccttcgctcagcgtaaagttatcccgcagccagtcttcagtgataaaggtcatggcgatacccctcagcaatcctgccagttagccggccaggccacatacaggaagcggacagtggatggtgtgccgaactcaatcgcggagcctttcgggataaacatcacatcaccggctttcgcaatcatggtttcgccctgatggcgcacatgcagctcgccttccagaaccagatccacttcgtcgtaattcagcgtccacgggaagaatgcgttttcccactgcataaacccggcagccatgctgctgttgtcctgcgcggtgatcagatccgcaatcccgacacggtgcggacccgcgccatcgaaattaccgaatttaaccgagctgctgtcgaccactttaatgccgcctttaccggtgacactgcggtagctctgggtattcggggtatcagtgttctcttccgccggtttgaatgccgccactttcgctttaatctgcgcgatacgctcctgcaccactttatcaaccagttgtgcaatcagggtttcggtgacattgccgtcaggcagctgcgcgataatgcactcgcggattttctgacgctctgcggatgaaatattgggttctgttccggcggttgcggccagcggtgcggcggccggtgcgctgttttgtgcggcatccacctcaccaatcacaaagcccaattgttcagccacaacatgggcttccggcgtgacaatactctctttcagcaccacatccagacgggttttccccgctgcgtgtgcttcccggatgtcattggccgttattagtttctccatcggatattcctcttattggctggcggctgtgggcaaaaactgtttcactttcaggacgtcatcaggatcaaggctgttgatggcaagtaacggttcctcaaacccccgcgtggagagcagctcgcgcacggcgggcacatccgcatccggtgcatcggctttgctgataaccgcaaagcggcgcatacggggatagatatcgagtaatccggcagggatccggcactccgggttatttgccgcgtggacataaaccagcacatcacaatctgccagcgtattaatcagcgcgtggtagagacggggatggctgaaatattcacccggtgtatcaacactgccttcatcattgaactcaatcgcctgtgttttacgcgcaagatcaaaatctccctgcaacgcattgaataatgtcgtttttcctgcacccacatcacccacaaacacaattcgtttcattcagacggcatccttaactgcacccgctcagctgcgggtgatatcacaaacggcataattgaggagctggcttaacccgcgtacagtctggatcaatgcttcttccactgcgccgacagagccgtaaatcacgagagcaccggtgaaacggtcaagaaagccgatatccacaccagcggcctttgtggcaagatcacccgcaatcattgcggtttcgccgggtgtcagcgtcataatgccgatggcttctgcaccgggaaccccgatttttttcgccagatcactgcccggatgcgcaatcaggtgcgccagcgtgacctgtttaccgggaacaaattcctggataatacgttccttttccatcgtgcttacctcgtcactctcctcataagaattgattcaatcctagtcacactcttaaaaaggggataacaaaaatcggcaatcacgattaaatgttgaaacagatcactaattggcagaattgttaatttggtaacaaacagcgatcacccggggaaaaggcacggaaattgaatctgttatttgtgacaggattgtttcagatgcggtaataagcaaaatatgtagtactgaaatgcgtaaaatacagcaattgccttacccgcgatattccggtaaggcaatgggagagaaagcgggttcgcggtgtgattatttctgtgtgtcacgaataaagtttttatccagtgactgcttcagcagactgataaacaggtcctcttcttccgagatattattattggaatggatccagccgataaccatttccccgttatcatgctcaatcggcacagcagtaatttcatccgggatgatatccttgataagacatcctgtccctatagtgtaactatttgtatttgatagtatattattcatcgatccccggtcatgggtatagataacccggtccggatcctcaatcacaatcgcctcttccataaaaaacatttcactgagaaaatcactgttattctgtgcatacatcacggccgggtaatttgccagctcgcggatattaatctttttatgctgtgccagcgggtgtgtccggcggataaaaatatgcggatgaacggtaatcagctcattgaataaaatcgattttttctcaagcagattcacaatgacatttttattactttccgtcagacaaataatcccgaggtgacttttattctgataaacatcctcaatcacattcagagtttttgtttccttcacccgcagattaaattttttattttcattgatgttgataaaattaataaaggcatcaataacaaaggcataatgctggctcgatacctgaaatttcagtgtggtgctgttcttataaatctttttgacgtcatcgactttttccagaatttccagtgccaggcgcagaaaacttaagccgtcattggtcagcgtcacccctttgctgttacggtcaaataaccggatatccagctccgtttccagctctttaatcgccgcactcagcgccggttgtgaaacatacagttttgaggctgctccgctgatggaattctgttttgctgtctccgcaaaatacttcagttgctgaaagttcatcacgttcctcccggacaccggtcatattattatcagcgcagtatagaggatcccggcggcaaaataccgggttacctgccggtttcccggcaggcggagaggatttattcgatatattttaagaacggtgagaccaccagcaaaataccgaacaacagaatgaaatacacctgaaagcttttgaatttgtgcagtttcttaacattgaataccagcagaaccggaatcagacacatcacaatgccgtacagcggactgccgagctgcacaaatacaatcagggagaagcccgatgatacccagacggttaatgccagaataatcacaaccgggatcaggatattcagcagtgtctgattaattttgtcctctttcataaagcgggtaagaatattcatcaccagccctttgacggactcagagaaactcagatacacacccagaaatgccgtcagtacagtgcagatattgagcgcaaccgtcatcactttaatcacactgccgggaataacctgcgcggcaatcgccagtgcggaaatgttctgctcaaatgcggaaactgcctgttcgtaactgatagaaaaagtaaacgagaaggagaaaaataacagaagccctgcgaggatcaggaatgcaatccggtgcgcacgcagtgttttataaatcgcgacctgtttatcttcctcctgtttgcggtaggcgatattcatcggattcagcatcgctacaaacgcaatagagaaaaaggcaaacggcagagtcagcagaacatcccgcaaatattcccccacaggaggaaacgctttaatattattaaagttccagtgcgggatcatgaccagcgccagtgccagaataatcaccacgttcacaataaccatcgggccggacactttaaacagcagcttttccccttttgatgaaataaacaccagcacagtaaacagcaccagcggataccaccaggtggaagttaacgtgatttccgacagcccgaaggtatgaatataagaggcactgtcaaataccacggcaatagaataaataaaggtactgtgaaccagcatcaggaaataaatcactcccaatatcattccccagttattaccgaggtattgggtgataacgctggtatagctgtcacactcttccgtttctgagagtgttcttaaatacagtttctgtaataaaaatgtcgccggataggcaatagccagtgcagcagtaaatacccataatcctttaattccgccctgaatcggcataacaattgtaccggcaccaattgccataccgatacataataccacccacccagcatcatatagtgtaaaaggaattttgtgtttctggtctgtattcagcaccagactattttcactgtttgtcattataaacaaccttctgatagatataatatcggaataaataagctgaaaaatggcaggtgaaacatttatctttctgttttcgtgcgtacttttttatttctgtctttaataacaataaatattccggtaaggaccagtgtggtggcgataataatctgtattgttaatatctcgccgataaatacaaccgccagaagaatagataaacacggcacacttaactgaaccgtgctggcagtgatggattcaatataaggtaaaacggaataccagagataatacgacccggcggaagccaccgcaccggataacacggccagaataataccgcgcatatcggcgtgataatcccccggcatcagtaacgacactatcaataaaatcaccgcgccggccggaacggccagcaggaaattataagcggtgttcaccggcgtactgcctttactgtttccggccagtgaatacaccgcccaggcaaagcctgacagtgccataaagataacatttaacagcggtaaatgaattgtgctgacggaggaagggacgagtaaatacaccaatccgccgaaggcaaataacaggccggtcagtgttatccggctgagtgtttcacctttgcataacccgtaaataatcatcgtcagttgcacgacaccaaacagaattaacgcgccgataccggcatcaatctgttcataagccagtgaaaatgccacgatataaacggtcaggcttatcccgctgatgacgtggatttttttaaactgaatatgataatgtctgcgcagtaataacggcagcagtgcaacagcgccactcacaatccggatcatactgaatgtcagcgaatcaatatgcgcatccttcagtgccacccggcacaacagtgagtttgctgagaacgcaatcatcacaatgattattttgagtatcagaaaattatttttcatagcggatttattaacggctgaagcatcagccggacctcagccgttaatcagggaggcggaaacgtattaaatctgactcagtacgttttccatctcattaataatatcgccgatattttccagaccgacggagaaacgcagtaatccggtggaaatacccgatgttttcagctcttccggagtatgaccgcggtgcgaggttttcgccgggtaggtcagtgatgtgctgtacccgcccaggctcggaataaatttaatcagtttgcattcacggataaatttatcgaccccgtcataaccgccggtgaattccacactcagcattccgccgaaacggttatgttcaaactgtttttccgccagttgacggaatggtgacgatgccagacccggataatacactttcttcactttcgggtgtttttccagatattccgccagtttcagtgcattatcacagtggcgctgaacacgtaaatccagggtacgcagactgcgggttaataaccaggcttcaaacgggctgataataccgccgtataaattctttttggttctgatagcggctgcgtggtcgccgtttaccagtgcaataccacaggtaatatcactgtggccgccgaggaatttggttgcgctgtaaagcagcacatccacatcaaaattaatcagcttacagacggacggcgtggcaaaagtattatccacaataaacagtgcgccgtgcttatgggcggtatccgcaattgcctgcaaatcgatcacttcaatcagcgggttagagattgtttctgtataaacgattttggtattcggtttaatataatcttccacattgtcggtaacaaaattaataaaagtaatgtcgataccaaaacgcggtaattcatttttcaggaaatcatgtacgccaccatataataccgttgatgcaataacatggtcgccctgctgaacaaaggaaaggattgccgtaataatcgcggacatcccggagccgaatgtcaccgcttcatcatagccttcaatgccggcaatcagcttattaacatagtttgtcgacgggttatcaatacgggaataaatatacccttctttcccgccgtaaacttcatcgagatcatcaatattatcaaaaacaaatgaactgctcatggaaatgggtgaaactttggcatatgaataatcgctttcatcatgccagtcagcagccagttttgtcatcattcctgcttcattattacctgtcattttttatttctctcaattatctgaaactactgacacgttatatttcaggtaaataaaatcaaatagcctttttttatcaggatatagatttttcttatggcacgaatgatgaaataaaaacagcgataaaaaacagtgagataaatattcattttctgttattttcccgtctgataaaaaataaagcagacagcctgctatttttatcaatccggaatgagaaaccggtcacaacggggattttcgccggatcaccggcagagtgtgaagtatctcgcaaattgacatttatttatcacttcctcacttgtacgtacaatagcactcacgtaacgcataaaccaatctggtttaaaccaaaaaggatcatccgatgaaaacaacacaaactgcagctgatcttgccagagagaaactcgatgccatgctgaccgccggtgttattacgcccggagacaagctgcccgcagaacgtccgctgacagaacaactcgatgtcaaccggatgtcactgcgccaggcactgctcagcctggagaatgacggaaagatcttccgcaaaaaccgcagcggatggttcgctgccctgccggtcttcaattacaacccgaaatccccggcaagttttaatcaggcggcaaaagcacagggacgggtaccgtcatgggaatacacagacaaactgacggtcactgatgcccctgctgagattaccggtaaattcggtcttgcggccggtgatgcggtgtatctcattaccggatggggggcactggacgggcataaagtgttctggcaccagacctatattaacccggctgccggtccggactttaccgcaaaactggataaccactctttcgcggcaatctgggaagaaaaatacaatatcaccaccacgactgccggactggcattcaaaccggcccggatgccggaaaccgccagtaaggccatcggttgtaccgcgaattcccccggtatccgggtggaaaaataccgctgtgatgcggaacataatatcgttcaaatcgacattgagtactggcggtttgaatctgtttatttttttgttgagctttagacac

SEQ ID NO: 59 - DNA, 327 bp, unknown
  Altogen 322075 strain
tcagtgcgcagtatgccggtacggccaaagttgatgccaataagctggtcagctttatctatgagctgagttcagccaaagtcggtaccgtgaagctggacggcgatgtggaaaagaaagtggcggatggggtgaataacttcacctataccgcgcaactggtcgataccaacggtaacccgatccgtcaggcggatctggtggtgaaatggacacaggataagggcaatgatgtcgtgttgtctgctgagaccagtaaaaccaatgcggacggtaaagcaaccatcacgctgacctcgaccaccaaagccgttgataccatcaccg

SEQ ID NO: 60 - DNA, 49 bp, unknown
  Altogen 322075 strain
atgtaacagagaaaattgccgatggtgtgaatacctttacctacactgc

SEQ ID NO: 61 - DNA, 606 bp, unknown
  Altogen 322075 strain
caacggtcaggcgacggtcaccctgaaatcaaccaccaaagcggtggataccatcacggtgaaagcgcagtacaaggaaaccaccgaagttgcggcgaataagactgtcagctttatctataacatggcgtcagccaaagtcggtacggtgaaactgaccggtgatgtggtgcagaaaattgctgatggggcaaataactataccttcacggcgcagttagttgataacaatggtaacccgatccgtcaggctgatctggtggtgaaatggacgcaggataagggcaatgatgttgcgctgtcggccacaaccagtaaaacggatgcgggcggtaaggctgttatcactctgacctccaccaaaaaagccgtcgataccatcaccgtgagtgcgcagtacaaaagcacgccggttgtggcagccgataagacggtcagctttatctatgacctggcgtcagcgcatgtcagtacggtcgcgctgggcggtacagtgacagaaaaagtcgcggatggcgtgagttacttcacttacaccgcacaactggtggatgtgaataacaacccgatccgtaaagcagacctggatgtgaaatggacgcagga

SEQ ID NO: 62 - DNA, 28338 bp, unknown
  Altogen 322075 strain
atgaattgtttgaagcctataaatcacaccgcccgccgatgccggatgatctgcgtgagcagatagcgccgctgcatgacatggtcgtcgcgatggggatgccgctgttatctgtttccggcgtggaagcggatgatgttatcgggacactggcgaaacaggcggcggcagaaggccgcgccgtgctgatcagtaccggtgataaagatatggcgcagctggtgaccccggatatcaccctgatcaataccatgaacaatactattctcgggccggaagaggtggaaaccaaatacggtgttccgccgtcactgattattgattatctggcgctgatgggcgactcctccgataacatcccgggcgtgccgggcgtcggcgagaaaaccgctcaggccttattgcaggggctgggcagcctggatgatatctatgcggacctggataaaattgccggactgagcttccgtggtgccaaaaccctcgcgccgaagatggaaaccaacaaagagatggcatatctctcttacaccctggcgaccatcaaaaccgatgtggaactcgatcgcacctgggattccctggcactgacggaaccggacttagataagctgcatgcattattcacacagtatgaatttaaacgctggataagtgatctggaaaacggcggctggctggcgaagaaaagtacccgcagcgcgccgtcaaaagcagcggtaactgccgcagtacagaccccggctgcaccggcggtcacgccggagatcagcagcgaaaactatgaaactattcttgatgaagaggcactgaaccgctgggcacaagtcctgcgtgaggccggtgagtttgcgtttgataccgaaactgacagcctggataatctctccgcgcgtctggtcgggatgtcatttgcggcgaaagcaggccatgcggcgtatgtgccgattggtcatgattatctggatgcgccggatcagttgttaactgagcaggtgctgcgggtgatgaaaccgattctggaagatgaaaaaatacggaaaatcggtcagaacctgaagtttgatcgcgggattatggaaaattacggtgtggaactgcgcggcatcgcctttgataccatgctggaatcctatgtgctcaacagtgttgccgggcgtcatgatatggacagcctggctgaccgccatctgaattacaaaaccaccacctttgaagatatcgccgggaaaggcaaaaagcagctgacgtttaatcagatcccgctggaagaagccgccaattatgcggcggaagatgcggatatcacactgctgctgcatcaggcactgtatccgcagctggaagccgaaaaatcgctgctgcatgtctatcaggatatcgaaatgccgctggtgccggtgctctcccgtatggaacggaccggggttctgatcgacgccaatgtgctggccgcacagtcagtagagctgacagcccgtctggatgagctggaaaaacaggcgtttgcgattgccggagaggagttcaacctctcttcaccaaagcagctgcaaaccattctgtttgaaaaactgaatctgccggtggtgaagaaaaccccgggcggtgcaccgtcaaccaatgaggaagtgctggaagagctggcggataaccatgaactgccgcgcgtgatcctcgagcaccgcagcctgtccaaactgaaaaccacctataccgataaactgccgctgatggtggatccgaaaacccgccgagtgcatacctcgtatcaccaggcagtgaccgcgaccggccgtctttcttcccgtgacccgaacctgcagaatattccggtcagaaccgatgaaggccgccgtatccgtcaggcgtttattgcccgtgacggctactgcattatggcagcggactattcgcagattgagctgcgcatcatggcgcatctgtcacaggacaaagggctgctgaaagcttttgccgaaggtaaggatatccaccgcgcaaccgccgccgaagtgtttggtgtgccgctggacgaagtgacggcggatcagcgccgcagcgcgaaagcgatcaacttcggcctgatttacggcatgagtgcatttggtctcgcccgtcagctggggatcctgcgcggtgaagcacagcgctatatggatctctattttgaacgctatccgggcgtgctggagtatatggcccgcacccgtgaacatgcggcagaaaaaggttatgtggaaacgctggaaggccgtcgtctctggctgccggaaatcaattcccgtaacggtatgcgccgcaaggccgctgagcgtgaggcgatcaacgccccgatgcagggcaccgcagcggatatcatcaaaaaagcgatgattgccgtggatgactggctgcaaaaagagaatatcgatgcactgatgattatgcaggtgcacgatgaactggtgtttgaagtacgaaaagaacagcaggcagagatggcagagaagatccgcgggctgatggaagcagcgatgaaacttgatgtgccgttaaaagtagaagcgggggttggcgccaactgggacgaagcccactaatttacgcgtcatctttcaatccgtggccgcgttggccgcactcagaaatccgggtcacatactggtgtatgctccccggatttcttcctttgccgccttgccacaaattgaaatctatagcgtaaaggcattgtgctttgatattgtcatattcagatataaatattatttattaaaatggataattattttcaaataaagaaattatattcgtattaggttatcatatgtaataattatactggttagttttcaacgtattgttattaaatggatttaatatgaaaaaatggttagggttcatatttttaccaatattgttcatgtggattgcagagccattggctttttttatccttaatccggaaagtggtggtttttggcaaaatgtactcaggtttattatccactttattggcggcgttattatatatcagtgttcacccggcaaaaaacatgcgttagcatatatctattcatgtttgtatatagtattaattttttatcttgccatatcgaccgatggtaatgtactggaaatcatggggcagtatattgttcagcggttctcactgattgaagagctggcaagatcatcaggtttgttgcttggtgtttggggatccattaagtctgatgaaagagaaagttaatcagagaagatggatacgtttgtataaagaaaaccggtacttattgcagcaccggttttttattaattctttaacgaatcaggcgttttcttcccgcattttcagggttttcttcacttttttctcaatgcgctggcgcttcagcggcgagagatgatcgataaatagcttgccgttgagatggtcgatttcatgctgaaggcagcccgcctgtaatccttccgcctcaagggtatgttctgcaccgtttatatcctgataacggacagtaacagcggagtagcgctgtgtctccgtataactctccggcagggacaggcagccgtccatcatcatcatttcgccgtcgcactgaataaattccggattaatcagcgccatcggctgatcgcggttttcagagacatccacgataatcacacgcttacagacacccacctgcggcgcggcaaggccgatgccccgctcggcatacatggtttctgtcatatccgtgacaaatgttttcagttcgtcatcaaaaaccgtgacgggttgggccgtttcccgcaggcagggatcaggaaaatgccgtaatgtcagtaatgccatagctaactcactaatataaataaaaattatggggagacgtactcccggatgcgctcagactatcataacagtatggtgtgaaaacggcatcatttgtgctgttttgttgctattttgtgcggacagccccgggctacctatagatccagatcgcataaatatgtaattaaagtacatttggaaggaatttgacggttttatgacaagctgaatcgtgcgcaatctgaaaaaaaattacaaaaaaggtttttttgtccgtaaatttgcggtaaagttattcgcgtagggtacagaggtaagatgttctatctttcagaccttttacttcacgtaatcggatttagctgaatattagctgctccggtcagacaatatctgaccggagcattttttttgcatgaaaaaacccgcggtacgcgggcttcttcatgagcggatatttcagaggatcactctgcgtcgctttcgctgaaccaggtgtccagtttcagacgtaacttatcaatgccgatttttttcagggcggagaaatattccacctgaatatcgccggtttcactcaggtcagtcagtgcatcacgcaccgccatcagctgctttttacgtgcgccgctggccagtttgtcggctttggtcagcagtgccagaaccggtacctgcatagccactgcccattcaatcatctgcatatccaggtctttgagcggatggcggatatccatcagcaccaccagaccgcgcagacagtcgcgcttttgcagatattcacccagcgctgcctgccatttgcgtttcatcgcttccggtacttcggcgtaaccgtagcccggcaggtcaaccacacggcagccctcagtgacttcaaacaggttaataagctgggtgcgtcccggggttttactggtccgcgccaggcttttttgttgtgtcagtgcattcagtgcactcgattttccggcattggagcgaccggcaaacgccacctcgatccccgtatcttccggtaaatggcggatatccggtgcgctgatgacaaaatgggtcgcttggtagttgtgcgttttaatggtcaaaatctgttctcctcaggtcgaaaccgggatgattatagcctaatgcatgttgtttaagaactgcggcagacagattactgtgtctgtttattctcagagcagaaaaaagtaataacaataaccgggccgggagtggtaaccgatataatccggaaaaacaaagtcttcccgatggaaaaagcacggatatttacgcgtaaaaagataaaaaaacagagcggtttattatcggttatacaggcaggtgttattttttatttggcataagttgagtttttcatcaaaaaatgaaatttacacataaaaatcaatatgatatttatatttacacgttaaatgcaataaaagcatcagcagaatgaacggttccgtcttattttactaaattacgggctgtgcgcagaatatcatcagtacaaatacgtgaaaaattcttatattaattagttatcccggcagtaaaggtaaattaaagtaaatcggtggcgctcagcgccattgcccattaaaatcgataagattagtgtcagtttatttcgttgaaaggaattgggaatgttaaaacgtgttttagttacatttgtggcagcctgtaccctcagtgcaacgtcgctggcgttcgcggcggagcagacgcatgttaaatttaccaccaccgcaggcgattttgaaattgcgctggataatgaaaaagcgccgcagactgtggaaaatttcaaacagtatgtcaccgataaattctatgacgatacaacattccaccgtgtcatcccgggctttatggtgcagggcggcggctttacggcggatatgaatcaaaaacagacccgcccgccggtaaaaaatgaagcggataacggtctgcgtaacctgcgcggcaccattgcgatggcgcgtaccgcagataaagacagtgcaaccagccagttctttattaacgtagcggataatgcattcctcgatcacggtcagcgcgatttcggctatgctgtgtttggtaaagtcgtgaacggcatggaagttgtcgataaaatctcaaaagtgaaaacggaaaacatcggtccgtaccagaacgtgccatcgacaccgatcaaaattatttctgcaactatcgtaaaataaaccgtattttcgtgcagactaaggggaatatttccggatattccccgtaagcatgtcaaactccctgatagtctgaataagacgatatctgcctctgcggcaccatgccgcattcgggctattttctctgtccggctgtggtattatagcccgcttcatgaaactgtctgtgcaatccccggggttgcagggtattgtcaacgtgtgcctgatacagcagtttgaaaataaaaaagataaatatatcagtcggatatagataatcatgctattaattatcgataattatgactcatttacttataacctgtatcaatacttctgtgagttaggtgcagatgtacaggttaaacgaaatgatgccgtcagcctcagtgatattgagcaattatcgccatctcacctggtgatctcaccgggtccctgcacgccgtcagaagccggtatttcactggatgcggtcagccatttcgccggtgaaatcccgatcctcggggtgtgtctcgggcatcaggctatcggccaggcgttcggcgcgcaggtggtgaaggcgcgtaaagtgatgcacggcaaaaccacagcaatccatcataatcagcagggggtgttcaaagggctgaaccgtccgctgaccgtcacccgctatcattcgctggtgattgccccggaaacattgccggcctcgtttgaggttaccgcctggagtctgcatgacggcaatgtggatgaaatcatggggatccgccataaaactctgccgattgaaggtgtgcagttccatccggaaagtattctcagtgagcaggggcatgaactcctgaataatttcctgaaatactaatcagttatcgcttattttatccccggttctgttttttcattcgttttgatttgattttttattcatatttggtgattatattttcacttgtggatagatcaggtaaggaacgatgacaaaacagaatgcggttacgcgcggcacttatgatgaagtgatgctgccaatttatgcaccggctgattttattcctgtcagaggtcagggaagccgggtgtgggatcagaacggcactgaatatgttgatttcgccggtggtattgccgtactggcgctgggtcattgtcatccggcactggtcgcggccctgaaaacccagagtgaatcgctctggcatgtcagcaatatttttactaatgaaccggcgctgacactggcgcagaagctgataaaacatacgtttgcggaacgggttttctttgccaactccggtgcggaggcaaatgaagccgcattcaaactggcgcgtcattatgcactgacccgtcatcatccttataaaaccaaaattatcgctttccatcacggcttccacggccggacactctttaccgtttctgtcggcggccagccgaaatatgccgatggcttcgggccgaaaccggcagatattattcatgtgccttttaacgaccttgatgctgtcaaagcagtgatggatgatcacacctgtgccgtggtgctggaacctgtccagggcgagggcgggatcacaccagccacaccggcctttatgcagggcctgcgtgagttgtgtgataaacatcaggcgctgctggtatttgatgaagttcagagcgggatggggcgcagcggcaaactgtttgcctatatggattacggcattgagccggatattctgaccacggccaaagcgctgggcggcggtttcccgatcagtgccatgctgacaaaacaggatattgcacaggtgatggtacccggtacgcacggtacaacctacggcggcaacccgctggcctgtgcggtcggtaatgcggcctttgatctgatcaacgacccggcattgctggcgggggtgaatgagcgccatcagtggtttgcggatgcactgcaatccctgaacagtacattcggtgcatttgcggagatccgcgggaaagggctgctgataggtgccgaactggcgggcatttaccgcgatcagtcaaaaaccctgctgggactggcggccaaaaacggcctgatgctgcttaacgccggtaccaatgttctgcgtttcacgccatcactgattattgaaaaagccgatgtggatgaagggatgaaacgactggcaaaaaccctgaatgatttccgggaaatgcagtaaacggcgggattcagaaacaaaaaaaacaggcgcagatgcgcctgttttggtgataagggcggtccggattaacgggtgccgtataccacgatggttttaccgtgtgcggagatcaggttttgatcttccagcatcttcagaatacgaccgacggtttcgcgggaacatcccacaatctggccgatttcctgacgggtaattttgatttgcataccgtccggatgagtcattgcatccggctgttttgccaggttcagtaatgtctgggcgatgcggcctgtcacatcaaggaatgcaaggtttccgaccttttctgatgtggtttgcaggcggcttgccatctgcgcggaaaggcgcataaggatatccgggttaacctggataagctggcggaactttttgtacgagatttctgcaacttcgcaggcgctttttgcccgtacccacgctgtacgttcctgtccttcctcaaataatccgagttcaccgatgaaatcaccctggttgagataggataaaatcatctctttgccttcttcatctttgatcagcaccgcaacagaaccttttacaatatagtagagtgtttctgccttttcgccctgatgaataagcgtgcttttggatggatatttgtggatatggcagtgagacaaaaaccattcaagcgtggggtctgtttgtggcttgccgagaaccattcgcgttatcctctgttgttagttattgcaaaccgttgtttacgctctgcaattatataaagtcttagcttatcatattaacttgctgaatttccggcaagttagtttattaaaatagtataataatcctcacggaaagatattgatcttagccatagataaatccttgccgtgtttttagcacaggaaaacagtcctgtcttccactgtctcgcttcagcataataaactatgagagagattgccagcccgtgaatgaaagggtagtctgtcgtgaattatattgatgatgagggtataaaaatggaagcgcgtgtaaagtgggttgagaacatgactttcttaggggaatccgcgtcaggacaccagattacaatggacggtaatgccggtgaaaaagccccgaacccgatggagatggtactgatggcaaccggcggctgcagcgccattgatgttgtctctattttgcaaaaaggccgtaatcaagtcattgattgtgatgtaaaactcaccgctgaacgtcgtgaaaccgcgccacgtttattcactcatattaatctgcattttattgtgaccggccgtgacctgactgaaaacgttgtcgggcgtgccgtgcaattatccgctgaaaaatattgctctgtttcattaatgttaggcgaaagtgttaacattacgcatagttttgaagtaaagaatattgaataattttttgaaatattatttttatttttgaacataaaccgggtaatacattatcacccggtttttttatcgcttgtttatttgttttccctgcaataattgctctgccagcggtgccattattaattccatcgccagccctaattttccgccggggacgacgatggtatttgaggcggaaataaaggagccctgaagcatggataacaaataggggaaatcgatttttttcaggccgcggaagcggatcacggtaaagctttcatcctgtgacgggatcgatttggccgagaacgggtttgaggtatccaccgtcggcacccgctggaagttaatgtgggtgcgggaaaactgcggggtgatatagcggatgtaatcatccatcgaacgcacgacagaatccatcactgcctcccgcgaatggccgcgatcattggtgtcacggactaacttctgtatccactccagattgactatcggcaccacgccaaccagcagatccacatgtccggcaatatcatgttccggcgtgaccacgccgccgtgcagtccctcatagaaaagtacatccgtcccggcaggaagtgcctcgcggggggtgaaggtgccgggcagctggttatagggcacggcttcatcataggtatgcaggtatttgcggcgttcgccgctgccgctttcgctgtactggcggaatgtgctttcgagcaggccaaaatcgttggcttcaggcccgaaatagctgatgtgacgcccctgttcgcgggctttgcggatggcggcatccatttccggccgcgtgtaacggtggaaactgtcgccctcaataatggccggaacggcatccagttgctggaaaattttacggaaagcctgactggtggtagtggtaccggctccgctggagccggtaacggcgataatcgggtgggtccgtgacatgcggcgtttcctccggctgattcagccgcggaattgtgccgacggcatgatgttgagtgtttcgtgtaattccgaccagacaatcacaatgtcgccgtttttgagttgcgtgtaaagatccgccactttatcactgagtgatttttcatgttcgccgtaatcggtgccttcgcgcagcaccacactttccaggatactttccagcgtttccggctcgatatcctgccagggaataatcatggtgtctccttcgcggccagatgtggtgcgagccattcagggatgcgctcctccagccataaacgcggacggcgccagctgccggacacaaagccgacatggccgccgtgttcagtcatctggtactccacacacgacggcaactgtgacagatccggcaccacttcctgtgccataaaaggatcatctttggcgtggatgatcagcatcggcttacgtacggcagggagtttcggcagggcactgcagcggcggtagtaatccgaggcatcgcggaagccgtggatccgtgaggtgataatgtcatcaaattcgcggatccgtttaatcgcgcggatatgcagcaggtttgtcggcagtgaattcgggtagcgcaccagtttgcgggtggcattgcgtttcagtcctttcagcagataccactgataaaaacgggaaaagcctttttccattttgaaagagcacggctccagcatcagcggagcggaaaccacaatacctgcatccactgcggcattctcaccctcttcggcgagataacaggccagcatattaccgccgagtgaataaccgaccgcgccggtcggtactttcccgtaggtatcctgcagccagttcagcagataacgggcatcttcggtttcaccggagtggtaaatccgtctggagcggttcggctcgccgctgcatccgcgaaaatgcataacaacacccagccagccctgacgggcggccgcagccaggataccgtgcgcatacgggctgcggaaactgccttccagcccgtgaaagatgaccagccgtggtttatggcgtgcggtatcgggatcttcgctccatgcaagatcaataaaatcatcatccggcagtgtcaggcgctgccagaatggctttatcgtcggtttccggcggaaaatccggggcagcaacgtttgcaggtgcgggttggttgcccaggaaatcggttgaaaatgactagacatagttagattcgtaatgaaaaaacatctcttgtttaatgaaaaacatactggtaattttccgagaagaaaatgaccacgttgccggattactcatgaccgcacatctttttatctcgctttccgtatttatgtttatcgcggcagtcacgcccggccccaataatatgttactgaccgcctccggtgcacagctcggctttcgccgtacgctggtactgatggccggtattatgctcggcatgcagacggtattatacctttcagcctttggtgttgcggctattttactgatttatccaaaattgcatactgctatgaaaattgcgggcagtctttaccttctgtggcttgccaaaaaactggccaccgcaccgtatcagcagcttaatgaaccgcaggtcagtaaggctgtcacctggtatcagggggcgctgttacagtttatcaatcccaaggcctggctgatgggactgggggctgtcggcagctacagcctgagcggtgatgcgtatatgctgtctgtcggggtgatgagtattgtgatggtctctgtgaatctggttgccgggcttatctggatcggattcggtgcctttatcggccgttttctgcgcagccgcaatgcctggttcaccttcaatattgtgatggggttactcaccgccgcctgtgtgccgctcatctggcttgaatagcagacataatataacctgcggaacaaaaacagaagctgaatgaaaaacagaccgcattgcggtctgttttttttatcactacagagaaatcagcttaaatccacattcttactgccgaacagcagggtaaacaggaatccggtcagataggcgacgagcaatccgccggtatagaccgccatccccatgaagataccactgtcggatgtcatcaccggaatggcgataatccccgatggcccgaaaacagtattcagcccgaccggatagccgaaccaggcgacaagcccgataaagaacccgccggctgcaccgccgcagcaggcagtgataaacggcttcacgcgcggcagggtcacgccgtagatcagcggttcgccgatgccgaggaagcccgggataattgctccccggatttgattacgcagcaccgagtcttttttcgcgcggacatacagtgccagcgcagcaccgacctgaccggcacccgccatggcgaggatcgggaacagggagttaaaaccctgagtgccgaccagcgcggtatacaccgggataaagccctggtggataccaaacatcaccgctatcaggaacagaccggcgagaacagcagcgccgaacgggttagcgttaaggtgcataaacagccaggacatgccgtcaaacagccagacgccgaccggcataatcacaataaaggtcagtgcgcccataatcagcagggtgatggcggaggtcaggatgatatccaggttcgccgggataaaacgccgcacctgccgctccacccatgcaccggtgatggtggcgatcagaataccgataatattaccgcgcgggtcaatgccgtgaccgaagaacgtttccataccggagtagaaacctttggtcgcctgcggatcataaccgaggataaacaacgccgcgatgattgcaccgttaacgccggagccgccgaaggctttctgcgcgttatagccgatcaggatccccataaaggtaaacagccctttgccaaagaccttcatgtaactgagcacttcgaccagtgtgccgttcggggacggatttccggtgacccagagtgattcaaacagtgtggcaaagccgagcagcagacccacaccgataaacccggggatgagcggggtaaaaatggtggcgaacttggcgaggaaacgctgtaccgggtttgtctgtttctctttcagatgctgcttctgatctgcggcaatttctttcaggctgcggctgtccggttcactgcccggcacatgctcatccagatatttctgtatcagctctgcggcagtttgtgctttgcccggccccagcacaatctggaactgctcatcactttcaatcacacccagcacgccctcaattttcttgatggcgattttatccgccagctgtgtgttgttcagtgtcagacgcaggcgggtcatacagttgccgctgtgcgccacgttccccggaccgccgatggcatccagaatctgtatgatggttgactgactgattttggccatggtgattaccttgcgttaagagtgcgccgcgccggtcagcgcgtcacggataaacccctgatgctgtgccagcagggctttggcgtcaccggcactcagctgtgccaggatcatcacgatggcggtcttgcagtgtccgtcacaggcggcaagtgcctgttctgcggtcgctctgtcacattccgttgcggccatcacaatacgtttctgccgctcaaccagtttggcgttggtcgcttccacatccgccatcaggttgccgtacacttttccggagcggatcatggcgccggtggtgatcatattgagtatcagtttctgggcggttccggctttcatgcgggaggagccggtaatgacttccgggccgaccaccggtgtgatggcgatcccggccagacggctcatttcactgtccgggttacagctgacggcggcaacggttgcgccgagcgacagcgcgtattccataccgcccagcacataaggggtacggccgctggcggcaatcccgaccaacacatctttcttactgaaattcagggctttcagatcactcaccgccagttcgcggttatcttccgcattttcaacggctttcaggatagctttgtgaccaccggcaatcagaccgaccacctgctctgccggggtgccgaaggtcggcggacactcactggcatccagtatcccgagacggccggaggtgcccgcgcccatataaatcagccgtccgcccaggcggaatgcctgtgccactgcatccaccacctgtgccacctgcggcagtgttttttccacggcaagggccacggtctggtcttcgcggttaatcacccgcagcatatccagtgtcggcaggctgtcgatatctgcgctggccggattgcggctctcggtaatcatagaggttaagtcaatcttcatgcgtgatcctttgtataagatataatcgcatgctagagaattaaatattctttttgtgtgagagttatcacagagcaatctattcaactatgatgctatagcaggaatagtttcatttcccatcatcattttattttttatatttaattgaatataaatgtattttttattagtcagatacgttatttatcaggaataattcgtcattttagttaaaataatttattccttttttattctccgcagaaggaaaacaggtacacatggcgatcctgacaaaaatcagctgggtaaaagcagagctggcgaccaatcagcagcatattgccgatttcatcctggcgcagccggaagaaaccgtgacactttcctcccaggtactggcggagcgggtgggtgtgagtcagtccgccatagtgaagtttagtcagaaactgggatttaagggatttccggcactgaaagtcgctatcagcgaagagattggccgcaaccgggtgctggcagctaatcagcagcaggcgctgcataaccggatagaagcacatgatccgctgctggtgatcgcgcagaaactggcacaggaaaagcagaattccattacggaaaccacacggcggctcgattttgaacagatggcagagattgtcgcctgtctggataatgctcgctgtattcaggtcgccggtatcggcggctccgggctgacggcgaaagatctggcctataaacttcagaaaatcgggctgatgacactggcggaagccgatcaccatatccagatcgctttttcccagacgctgaccgaaaaggatgtgctggtggtattgtcattcagcggcaaacgcaaggatatgctggtcaccgccgccacggcgaaaaaacagaatgccacgctgattgcgattaccgggaaccgtcagtcaccgctggcaaaaatggcggattatgtgctggaaacggtcgcggaagaaaacgagtggcgcagttcgtctatttcctcacggacggcgcagaatacagtgacggatctgctgtttatggcgctgttacagcggcgggaagagcaggcgcggcggctggggatcaatgcccgcaccatgattaacagcctggacggctgataagaaaagagagcggcaggggccgctctttatcatttactgattttcaaaggcctgtgtcatggcttcgaggttttcctgaatctccatccaggccatttccgcctcttccagctccgctttgaactgtgcctgttcctgaagacaggtgttcagttcggctttgcgcgactgatcatacaagccgctgtcaccgagtttttcctcaatcacggcaatggcatctgataaccggctcatggttttttccagtttctcagattctttgcgcagcggctgagtctgctggcggaattccgcctcacggcgtttctgctctttgcgatcctgcgcggtgacggtatttttttcctcgccgttttccgccgccggctctgcactctggcgcatctgtttctggctgtctgccagccagcgctgataatcatccagatcgccgtcaaacggctcgacctgaccatcatgtaccagatacagatcatcggtggtggatcgcagcaggtgacgatcgtgggaaaccacgacgatcgcgccctcaaattcgatcagggcttcggtcagtgcctggcgcatatccagatccaggtggttggtcggttcatcgagcagcagcaggttcgggcgctgccagataatcatcgccagtaccagacgcgctttttccccaccggagaaacggccggtgttatcggtcacctgatcacctttgaacccataaccgccgaggtaatcacgcagttgctgttcggtctgatccggtgccaggcgcaccatatgctgtaacggggattcatccgcccgtaaaaattccagctgatgctgggcgaaataccccagtttgatgcccttggcgagaccaattttgccctgtaacggctccagttcaccggcgagcattttaatcagggtggatttacccgcaccgttacggccgagcaggccgatacgcgagccgggtaccaggttcagcttgatattatccagcaccactttctcaccgtatccggcgctgactttttccattttcagcagcgggttcggcagtgcttcaggcgggcggaaactgaaacggaacgggttatctgccagtgccggggcaatcatctccatgcgctccagcatcttcagacgactctgcgcctgtttggctttggtcgcctgagcacggaaacggtccacatatttctgcagatgtgcgcggcgtaactgctgactttcatactgtgcctgctgctgggccattttctcggcacgctgcacctcaaaggaggagtagttgccggtgtattcaaacaggccgttttgttcaatgtgcaggactttatcaatgatcggatcgaggaaatcgcggtcatgggagatcagaatcagggtgccgggatagctcttcagccatttttccagccagatcacggcatcgagatccaggtggttggtcggttcatcgagcagcagcagatcagagcggcaaatcagtgcctgtgccaggttcaggcgcatccgccagcccccggagaacgcccgtaccggggtgtccagctgttcctgtgagaatcccagcccgtgcagcagtgtggcggcgcgggaacggatggtccaggcatcgagtgtgtcgagctggccgtggatcacggcaatggcgtggccgtcattctgttcattcgcctgctgtaattttgcctcaagctcacggaattcgcggtcaccgtcaatgacatactcgatcgccggttcatccagtgccggggtttcctggttaacccaggccatggaccagtttcccggaaatgacacactgcctgcttcggcctgtaattcgcctttgagcagtgccagcagcgtggatttaccgcagccgttttttcccaccagtccgactttctggcccggattgatggtggccgttgcgttgtcgagcagaacacggacgccgcggcgaacctgaagtgaagagaaaacaatcataaatatcgatagggtaagtaattgagagtaaaattaatgtaattcgtgcgttgtcagcagcaaatcacccgtcagcaggcgaggagtatcgttgcagcgggcatagtagcgaaaatcacaaagattctcacgtttttaagaggaagtgatgataaataatccgaccatattactgatttacgcccatccggaaccgcatcactccatcgccaacaaggcacttatctctgcggcgtcggaactcgggcatgtgacggtgcatgacctgtacggcacctatccggacttttttatcgatatccgccatgagcaggaactgctgcggcagcacgacatcattgtgtttcagcacccgctgtacacttacagttgccctgcgctgctgaaagagtggtttgaccgtgtgctgacccgtgatttctccggtgagcagggcggcaggcagttgtccggcaaatactggcgccaggtgatcacaacaggggaaccggcggaagcttatcagcacggcggctataaccgttttccgatcagtgagttactgagaccgtttgagctgacggcggcactgtgtgaaatgcactggctggcaccggttattctctatgccgcgcgccgccagggaaaagccatgctgcatgagcaggcgcaggcgtattgtgactggctgcgggcaccgcaactgaccggagggcgtaaaaatggagccaactgacggcaacctgctgcatgcaggtattgtgtttctcgcggcagccgtggtgatggtgccggtggcgcagcggctgcgcatcggcgcggtactggggtatctgctggcaggaattgctatcggcccgtgggggctgggatttatcaaaaacgtcaatgagctgctgcacttctctgagcttggtgtggtgttcctgatgtttcttatcgggctggagctgaatccgcgtgagctgtggaaactgcggcgatctattttcggtaccggcaccgcacaggtggtgttctccgccctgatcctcggggtgctgctctggctgacggatttctcctggcaggcggcggtggtcggcgggctgggaatggcgatgtcctccacggcgatggcgttacagctgatggatgaaaagggcatgaccaacaacgacagcggccagatgggattctcagtgctgctgttccaggacatggcggtgatcccgattcttgcggtgatccctctgctgggcggggaaacggcgggcagtgactggtatcgcatcggtatcaaaattctggcttttgccggactgctgatcggcgggcgttatctgttacgaccactgttccggctggtggtgaaatccggggtcagtgaagtctttaccgccgcctcgctgctggtggtgatcggctctgctgtgtttatggagcagctcggtttttccatggcgctcgggacatttatcgcgggtgtgatgctggcggatacagaataccgccatgagctggagatcacgattgagccgttcaaagggctgctgctggggatgttcttcatttcggttggtatgtcactgaatatcggcgtgctgtggcagtatctgccgcaaattctgctgggtgtgattgtgctggtgagtgtcaaaatgacggtgctgtatctgctggcacatctgacctgccggcgcagcgggcgcttacagtttgccggggtgctcagtcagggcggggaatttgcgttcgtgctgttctcggcggcgctggccagccgtgtgattacggatcatcagatggcgctgctgctggtggtggtcaccctttccatgatgaccacgccgctgctgatgcagggcatcgatatgattctggcgcgccgttacaataatgccgaaccgggagcgggcgaaaccccgtttgtggaggataaccatccgcatgtgattctggtcggtttcgggcggatggggcaggttatcggccgcctgctgatggcgaacaaaatacatccgacggtactggaaaaagatgtcagtgcggtcagcgccatgcgccgttacggctataaggtttattacggggatgcgacaggactcgcattgttgcgctctgcaggggcagagacagcaaaggtgattgtcattacctgtgataagccggaagataccatgaccattgtgcagttgtgtcaggagcacttcccgcatctgcagattattgcccgcgcccggggacgggtggaggcacacgagctgcttactcacggcgtaacgcagttcagccgcgaaactttctcgtcggcgctggaactggcgcgcaaaactctgatcgggctgggcacgcatccggcggaagcacaccgggcgcagcaattattccgcaggctggatatgcagttgctgcgtgagcttatcccgcaggcagaagaggaaatctcgcatatctcccgcgtgaaagaggcgcggcgcgagctggaaaatctgtttgataatgaaatgaaacgggaaaaacatctgccggacagctggaacctgacggaagactcaccgggcagcggacggacagagacaggagcagaaaaatgagcaaccggaaacggtttattgcaggtgcggtatgccctgagtgtcaggcacaggataccctcgccatgtggcgtgaggataatgtggatgtggtgcagtgtgtgcagtgcggccatctcgagcggcgggcggacgcgcatgcggagcagcatgtgcgcaaagatgaacaggtgattggtatctttacaccgggggaataacaggccgctgcttttcacagagaatttgggggaatttgtcccaaaacagatacagtggctgtaaattccgttacaatcggcgcgttaattaaaatcttatcccccgcggatgtgtaggagataccatgaaagtagcaaaagacctggtagtgagcctggcttatcaggtaagaacagaagacggtgtattagttgatgagtctccggcaagtgctccgttagactatctgcacggtcgcggcgcgctgatcagcgggctggaaagtgcactggacggccgtgttgccggtgatgtgttcgacgttgatgtcggcgcaaacgacgcttacggtcagtatgacgaaaacctggttcagcgcgtaccgaaagacgttttcgtcggtgttgatgagctggaagtcggcatgcgtttcctggcagataccgatatgggtcctgtgccggttgaaatcaccggtatcgaaggtgacgaagtgatcgttgacggcaaccatatgctggccggtcagaacctgaaattccacgtcgaagttatcggtgtgcgtgaagcaacagcagaagagctggagcacggtcacgttcacggtgaagaaggcggctgctgcggtggccacgaccacggcgaagaaggcggttgctgcggcggcggccacggtcatgaccatgatcacgaacacggtgaaggcggctgctgcggcgggggcggtaaaggtcacggccacggtaacggcggctgcggttgtcactgataacccgcatctgaaccggacaaaaaaagcgcattcctgacggatgcgctttttttatgcctgaagtttatcagtagtgcggcggcggcacttcttctgacagcggtgccacatttgagcccggggtggctttcaggcgttcggtcagcaggcggagcctttcattcagccgggtgatatccatctgctgctgtgttaccacctgattgagttcctcaatggtcagatcctgaaaggcggttttgctttccagttgttcgaggcgttgttcaagttccaaaaggtccatcgttttctcctgtctgagacggggattactgtgtaaaagtatgtaatattcctgtgaaatacacttagtgtgagaggatatcttttattggggggttactatgaaacctctttttgctaaggttgtctcagcatcacaaaaccgtgacattatgatgtcgcccggtgacggctgcaaggactctctgacgtgatctgctgtgcggtacgtcctgtaactgttgcaaaacttatggagaaaaggatgaaatcactgtttaaagcgactgttgtcgcaacctcgctggcaatgacattaggtatgtcacaggcttatgcggataccgcgccgaaaaaagaagaagtgaagctgaacagcgcatttaaaaccgcaagtcagcagaatgcttatgcgctgggtgcgtcactgggccgttacatggaaaatgccctgaatgagcagaaatccattggcctggatctggatcgcgatcagatgatggcgggtgttcaggatgcattcaataataaaagcaaactgagtgatgaagagatcaaccagacgctgcgcggctttgaagagcaggtgaaaggtgccgctcaggaaaaaatggcacgcgaggcgactgaaaacaaagcagccggtgacaaataccgtgccgcattcgccaaagaaaaaggcgttgaaaaaaccaagagcggtgtgctctataaatctgagaaagacggtaacggcgcatctccgaaagagactgacaccgttgttgttcactataaaggtgcattaatcgacggtacccagtttgacagctcttacgaccgtaacgagccgctgaccattcgtctggacagcgtaatcaaaggctggaccgaaggtctgaagcagatgaaaaaaggcggtaaagccaagctggtcattccgccggaagcagcttacggcaccgacggtgttccggggatccctgccaactccaccctggtctttgacgtcgagttactggatatcaaacctgcggccaaataagccctgctgataccggaaactgacaaaaacccgcgccctgttgtgcgggtttttgtttccgcaacgatcaggattatgaaaaatttgcaaaacatccgtgtttttttgtattttttaccagaatttgatcacctcaggcgcaaaacggcctgtttttcgctataacttaacctgcgggtacctgcacagaaccggaagcccgtcatttgctgctttcctgcacccgggaaatccgggtatataattgatacatgatgacagggtaatcctcctcctgcagtgaaagattacagatgagtaaaaccaacgacgttcacacgttacaaagagtggtgtattaaatgtctaacccagtattatttaatgacaatgattcggattacattgtaaatcatccgtttactgaaacggattatgagatcctgaaatcctatgaggcggctgttgatggcctggcgctgctcatcggtgagcactgtgaaatcgttctccactcactggaagacctgaagcgctcagcggtgaagatcgcaaacggtcaccataccggccgtaaagtcggttccccgatcacagacctcgcgctgcgcatgctgcacgacattacggatgaagactgcagcacctcgaaagcctatttcacacgggcgaaaaccggggcactgatgaaatcgctgacgattgctatccgcaataaatcacgccgtatcatcgggctgctgtgtattaacatgaacctggatgtgccgttctcccagatagttcagacgtttatcccgaaagagctggcagaagagacctccaatgtgaacttcgcctcttccgttgaagacctggtggcacagacgctggaacagacgattgaagaagtgaatgccgaccgcaacgtggcaaacaacgcgaagaacaaacaggtggtactgaacctgtatgagaaagggatatttgatatcaaagatgccatcaaccttgtggcggtgcgtctgaatatctccaaacacacggtttatctctacatccgccagtttaaaaacggcgagtaaggcagcacggagcaatgacaccgttatcttactgcctgctggttaccggcccggcctacggcacacagcgtgccggcagtgcgttgctgtttgcacagcatgtgattgcggccggacacaggattcagtgtgtgtttttttaccgcgaaggggtcagcaacgccaatgtgctgacatcaccggccggggacgaaaccgacatggtgcgtcagtggcagcagcttgcccgcgataacggtattcagctggcagtctgtgtggcagcggcgctgcgccgcggtgtcaccgatgccgcgcaggcggagtcgctgaaactggcggcggccaatctggcggacgggttttccctcagcggcctgggaactctggcggaagccatgatgacctgtgatcgcgtcatccagttttagggagatccggtgaaacgtatcgcatttgttttcagaagtgcacctcacggcagcaacagcggccgggaagggctggatgcactgctggcaaccagtaattatacggaagaggttgcggccttttttgtgtctgacggggtatttcagttattaccggaacaggcaccggcaaaaattctcgcccgtgattatatctccaccttcaaagtcctgccgctgtacgatattgatgagtgctactgctgtgcggaggatatggccgcacgcgggttatccccggagacgccgtatatcctgccggtcacctgcctgagtgcggcggaactggcccggaaactggcggcatttgacgtcgtggtgtcattttgatctacttacggtgagcaagatgctatatactgtcagccaatcgccatttcgtactgatatccaatcattactgaatctgttatcccctgaggatgacatcctttttaccgaagatggcgtaatcgcagcaacggaaggtaacccgttgttgcaggcgcttattcagtcgggtcatattccctgtgtgttgcgggaggatgccgaagcacgcggtttattaccgttcctttcgggcaaagtgagaatcacagactatactggttttgtggagctcacggtcacacacacgcaacattttgcgtgggaatagcaaatatcattgtatatttcttgacaccctgttgcgtcagcaataaaatttcgcgtcctcgtgttttgtctttgacagatacgaggcacaaatccgtgtttacgaagcaaaaaaccaggagctttttttataatggcaacgattaatcagctggttcgcaaatcccgtagctcgaaagttgtgaaaagcaacgttcctgcactggaagcatgcccgcaaaaacgtggcgtatgtactcgtgtatataccaccacacctaaaaaacctaactcagcactgcgtaaagtatgccgtgtacgtttaaccaacggttttgaagtttcttcatacatcggtggtgaaggtcataacctgcaggaacacagcgtgatcctgatccgcggtggtcgtgttaaagacttaccgggtgttcgctaccacactgttcgcggcgcactggactgttccggtgttaaagaccgtaaacaagctcgttctaagtacggtgtgaagaagccaaaagcttaatggttctccgttaagtaaggccaaacatttatcgcattaatgtcaaataaactcattgagttttggacaaccctgaattaacaacggagtatttccatgccacgtcgtcgtgtaattggtcaacgtaaaattctgccagatcctaagttcggatcagagctgctggccaaatttgtaaatatcctgatggtagacggtaaaaaatctaccgcagaatcaatcgtatataccgcgcttgagaccctggctcagcgttcaggtaaagagcacctggaagcattcgaaatcgcactggataacgtgcgtccgactgtcgaagttaagtcccgccgtgttggtggttctacttaccaggtaccggttgaagttcgtccggtccgccgtaatgcattagcaatgcgctggatcgttgaagctgcccgtaaacgcggtgataagtccatggctctgcgcctggcaaatgaattatccgatgcagctgaaaacaaaggcactgccgttaagaaacgtgaagacgttcaccgtatggcagaagctaacaaggcgttcgcacactaccgttggtaatcaaaccgtagtgaattgtgtatagggtagccgtaaggctgcccgaccaaattaaacgaacgtccaagagagaggaaaaaatggctcgtcaaacacccatttcacgttaccgtaatatcggtatcagtgcacatatcgacgccggtaaaaccaccacaacagaacgtattctgttttatacaggtgtgaaccataaaattggtgagacccacgaaggttcagcaacgatggactggatggagcaggaacaagagcgtggtattactatcacctccgcagcaaccactgcgttctggtccggtatgggcaaacaatttgaaccacaccgcatcaacatcatcgacaccccggggcacgttgacttcacaatcgaagtagaacgttccatgcgtgttcttgatggtgctgtaatggtttactgtgccgttggtggtgttcagccacagtctgaaaccgtatggcgccaggcaaacaaatatcatgtacctcgtatcgcgttcgttaacaaaatggaccgtatgggtgcaaacttcctgaaagttgttgatcagatcaaaacccgcttagcggctactccggttcctcttcagttagctatcggcgctgaagaatcattcaccggtgttgttgacctggttaaaatgaaagcgattcagtggagtgaagaagaccagggcgttaccttcgtctacgaagatatcccggcaaacatgcaggaattagctgctgaatggcaccagaatctggttgaagccgcagctgaagcctcagaagagctgatggaaaaatatctcggcggtgaagaactgactgaagctgaaatcaaatcagcattacgtcagcgcgtactggcgaacgaaattatcctggtaacctgtggttctgcatttaagaacaaaggtgttcaggcgatgctggatgcggttgttgagtacctgccatctccgacagaagttcctgcaattaaaggtattctggacgacggtaaagatactccggctgagcgtcactcttctgacgaagagccgtttgcatctctggcatttaaaattgcaaccgacccgttcgtgggtaacctgacgttcttccgcgtgtactctggtgttgttaactccggtgataccgtactgaacccggttaaatccaagaaagaacgtttcggccgtatcgttcagatgcacgctaacaaacgtgaagagattaaagaagttcgcgctggtgacatcgcggctgctatcggtctgaaagacgtcactacaggtgatactctgtgtgcgattgatgcaccaatcatcctggagcgtatggaattccctgagccggtaatctccgttgcaatcgagccgaaaaccaaagctgaccaggaaaaaatgggtatcgcactgggccgtctggcacaggaagatccatcattccgcgtatcaagtgatgaagagactaaccagactatcatcgccggtatgggtgaattacacctggacgttctggtcgaccgtatgcgtcgtgagttcaaagttgaagcgaacgtgggtaaaccacaggttgcttaccgcgaagcaatcactatgaaagtgactgatatcgaaggtaaacacgctaaacagtccggtggtcgtggtcagtacggtcatgttgttatcgacatgtacccgctgaacaagaaagatgccgaaggcgtcaacatggaatacgaatttgtcaacgaaatcaaaggtggtgtgattcctggtgaatacatccctgcggttgacaaaggtatccaggagcagttgaaatctggtccgttagcaggctaccctgttgttaacatgggtgttcgtctgcacttcggttcataccatgatgttgactcctctgaactggcgtttaaactggcagcatctctggcgtttaaagacggcttcaaaaaagcgaaaccagttctgctggaaccaatcatgaaagttgaggtggaaacaccggaagactacatgggtgacgtcattggtgacctgaaccgtcgtcgcggtatgatcgaaggtatggatgacatgcctaccggtaaaatcgtccgtgcgcaagtgccactgtctgaaatgtttggttatgcaactgacctgcgttcacagactcagggccgtgcttcttactccatggaattcctgaagtataatgaagcgccaaacaacgtagctcaggctgttattgaagctcgtaatgcaaaataatcggtaatttaccggtttaactcgttaatttcagtcccttctcacagtgaagaagggacttcataaggaatagagtcgtgtctaaagaaaaatttgaacgtacgaaaccgcacgt

SEQ ID NO: 63 - DNA, 88 bp, unknown
  Altogen 322075 strain
aaacggtaggaaagctccataccaatctggctgtcgttggaatcaccacgggatgtctgacctttaaacgtgatcagcgggaacgggg

SEQ ID NO: 64 - DNA, 456 bp, unknown
  Altogen 322075 strain
ggtggtactggccaggctgacgccgtcgccgaagtactgttcatattttgcaaatgcacctaactgcggataatcaggcagatagccctccgcacggatatcaaacccgttagccgggcgttcatcataatcgcgcatttcatgcagttttgactggtgccagcctgttaccctgaagtagccgttagccgcaaacttccggtagttggcccataactccccgccgacaccgacccgcgagttactgccggtgatatcgtagtcataaaagctgttcacgccccacatccagccatcttcatactgacgatagcccagaccgaggttagtggtggtgcgttcttcattagcgcgaagcccgatctgtgagaagaacaggctgttcgggttatcaactaacgggaccagtacatccgcatcaccggttttattactgccgaactgaatgcgggcgtg

SEQ ID NO: 65 - DNA, 480 bp, unknown
  Altogen 322075 strain
accgagggatgcatccaccgcatcctcactggagaggatctgcccggcctgtgaagcgttacccgcccagcgggcttcattctttgccgcttcatcttccggagaaatatccggcagaccgagggtcggcagggcactgaagatatcatcggtccgtacggtattatcacgcggtgccgggttcgccgggtcaggcagcgtgctgacactcatcgggaacggcatggcgttctgtccggagataaagccactgcccgaaccagccggcatcacgccgtattcactgccggacggcatctcaacggtaaatccctcaccgctcagagtgctgccggaagcggtttttccgccctgtggtttcggaggcggagccggactcggagatgtatccatcaatgcattaagtccgtcaaatgtttctgacatgattaattcattgtcatgttctgccgcgtaggcaacagataatgttgccgtcga

SEQ ID NO: 66 - DNA, 2658 bp, unknown
  Altogen 322075 strain
cacaggcatgaatacatccccgaaagtaagattaaagccataaagtaataatcagaaaacactctttcattatttccgctaataagttcaatcaccggacacgttataaaaatatgttattttttactctcactgaatgtttacatatcatgggagtatttatttcttgctgcgttaattaatcaggatgttattgcggcacaaatacacacacccgccacctgtcaaaggcagcaggaaataagagcgtcgccttgccgcatttaatatcagcaatcaatttaaacacttattattcgagttacacgcacattattgaaagtaaacaataagacatatttttacattatcacacagtatatacagggctcagaaacaggtcaaaaacagacaataaccattaataatcaacatattacataaaataacaaccaatataagcctgaattactccttcaatagatttttatttaactattttttacaaaaaaagataaatacaggcaccaccgggagcaaataccacctgaaaataacaggtaaaattatcattacttattacgggagttaatttgcattttattaaaatataacaatccataaatacaagttaaaggagtttaagataaggagagactaactgaggaaacagaaaggaaataccgttacctgatacggacgagcactaatacagtgacactcatttagtgtccgtccgtacagatgagttattgcactgattcagtcagggctattatttgatctctgttgataacgggaaattacaatcgaatgaaacggacgtttgcgcattccctgaaggcgatgagacgtaaaagcccagaaatgcttccggaattttaaaattctcgtccttcgtcgaaaatccctgaatagtcatcttactcgttgacgatgacggtgaggttgttccggcattattaccgaataatttacaggtcagctgagtgtcgccatcagccactgttttatccagaacctcatacttcagcgtgacatcttttgatattgcggttgaaagccagttaacacagtcaaccgacacattatccacatcatagttataaggcagtattttctgattggcagcaccatcatacaaatacagattatcctcagataacgaggtcttcacggatatgtctttgctggtaaattcacaggcaacctgtaaatctttcatcgtcgtaaaatctaatgtgtgggtggtataacctgaatctgcataatctttacaggttgccggagaatctgcattgcaaacgcgccccgccgatgacgtatttactgtatacctgttgttgccgccggtcagcgtcgtaatatcttcacgcggaatttcaacaagctgagtcagatcaacaccatgagcctctgccacccgtaacgcattataatgtgttgtggcactcatcagttcctcatcaaaactgccgtctccccgcaaatcaacaaaaccggttttaatcactttattattaccaccggatgtcactttataattcagcgtacaggactccagcttgttatttgcataggtttttctgcatgtatttgcatgattagtttcatgccccaccagatacttatgaatcagttcgaatgaaaatatcctggtggtcgtttttacattctcaacctgataatgtgcatacgcattgcccgacaacacaaccaatgccatggcaattattttatttttcattgcattacccttataaaaacagagctgaattgccggtataatattgataccggcaattcagtaacggattaattggttacgatggctgacttcagagtgaatttcaccaggtcaaatatcagtgcataatcttcattgatgtcgattccgcctgcatcttttgccgatacagataaactgacattctgaattttacttctgacgcccggtttaaataccccgtccgcaccggtaacaccttccgcattgtctatcatcaccattgcaggctgtgttttttcggtaactttgatattcacgccactaatcgggttatcattggcatcaacaacttttatttctaagttattgaccgataccgtatcggcaactgcatgtttatcctgatttaaattcgtgataatcatttttgccgtactcttatccgcgatcagtttcaccgtttttgatgcaacgccgaaatctgcaccattcactttcactttgatctccgcattaccggctgtttttcctttcagcacagcattgtacgtaccctgcggtgcttccggtttaccagtgatagtggtattggctaacgcagtactgaattcaactgtctgtccggtgatcaggttattgttaacatcgcgcagaatcagtttcagtgctgatgtttctgtatcattggctgtaatcgtctccggtgttaccaccagctctgatttactgctgtccggattgttcttgtctccgatcagtgtgacatctttggtcagccccgccagttccgttccgttaactgtcacagtgacagtcgccgttccggcttttgtacctttcagggtcgcggtatagacaccatcctgatcccccggtgtcatggtgatcaccgtattttccagcgcagttttgagctcaaccgtctgcccggtgatcaggttaccgttgac

SEQ ID NO: 67 - DNA, 48422 bp, unknown
  Altogen 322075 strain
gaccctgcgagccttccgtgcgcagggtacccgccacggcgaccaggctgtcgcccagacccgcgatattacggatagtgacctgtgcaggctgatcgatagtcactgcggaatgcatcccgctgttcgccccggtgacagtcagcgtgtcattattcaccaccagctgacccgcctgagtaccgctcagagaaccattcacctcaccgccgtttttcaccgtcagtttgccgttacccagcgccaccaggctgtttgctgcggacgtgagtttcccggcggtctgctctgttccggcaccggctgtgctggtcagttcgaccgccgtacctgatgccagatccagcagttgcgtattccctaacacattatccgcttctgcccgtaatttgccgtgacggacaaacgtgctgccggtgtaatcattgctgttattagacagcgtgacgtattcacttgcagtatcaattgccaggtcgccctgtccggtgattttcgccccgaggttagccgccgatccggattttccggactgtgccgccagcaccagtgcatcactgcctttgccctgtaaatccacttcggtcagctgataagccacatacagcccgtctgctttaccaccggcgtttgcactggtctgtaagccgtaatcataggtgcctttcgccaccactttgccgtcctggcgcagatcctgctctgtcttcgtatttgacgggatcacattaccgtctttatccgtcagttgcagattcagcccgccggtataatccgaggctttaccggcattgaccagctgcaccacggaattcccttcatcctgctccagcagcggcactttgttatctaccgacggcgttggcagattatcaaaaccgtccgctttcacctgaacagtgcctttcgcgttgtccagttcgagggagttcacgctgagatgaccatccgccttgctgctgccggtgatattgtcgttaaaggccagtgtcccgccgctcattgccaggcgatcaaatgactgtgtgccgacgcctgcgcggacggttgcaacagatttatcaccgatatccagacgggatttttgcagcgcgcgggtgttgtcaccggcgatatcaaatgtgccgtttgtcagacgcagcgtgccggtgaagttatcccccgcaaaagccgcgctcttattattaaagtcaaacgcctgacccgctgttgaggtggtgaccagaccatccccctgcaactggtgggcaaaggtgtgggctttattctgattgataaacagctcaccgccctgttttactgtgataccgtcatctgccgtcagttcattcagcgtgatatcagtattgcgcagttcaaaacggccttcctcaacattcagtttttcaaagccgctgattttgctgctgtcctgtaacacatagtggctcgccttacctgtcagcgtcagcgcatcctgtccgccgctgcccgctttcagattgccgaacagggcatcactttgtgcttcagagacatttttcagaatcacattgttctgaccattaccgacagtaccggtctgtaatttggtaccgccgttcagtgtcacggtattgttgccgttaccggctggcagaataccggttaccgcttttccgatcatttcaatggtgttatcaccgtggcctgtcgcgatatcactggtgttaccgctcagcgcgatggtgttattaccgccgcccagtaccgattttccgctgatagtgccgctgttggtaaaacggatattggtgttctgatgtgcatccactgccatgccgttagtaccggcagtcacagtgccgctgttggtgaaactgaaatcatttctcagcgcaatcagatccaccacgctgtggtcagatgctgatgtcagtgtgccgctctgtgtgatgtttttagtctcaccaagcaccaccagtgcggattccccttctgctgattcgatattcacattcattccgctgataacatcaccggaagtattggtcacaataccgttgccgcctttatctttcacattgatagtggtgccgccggcgccggaggtgtcgagcttgcttttcgccatcgtccccccgcctttaccgttatccgcttccagtttcaggccggaggcattctcaccgctgacattgatggtgccggtgccggacagtttaaatgcaccgctgtcatcatcggtattcagcagatgcagaccgctgccgctgccggtgacttcaatattggcgttatccagtttcacgtttgaaccggaatgggcccgtaccgcatccgccgaattttcaccgaggatcttaccgctgccgccgatggtcatggaggcgtctttattcagacggactgcggcggtgccgttattggcggtgatattaccggtgttatttaccacggaatttttgccgtaaatatcaacacccacaccattcacggtaatatcggtggtgttattgaccgtcccggtttccacacggatgccggtagcgttatccgctttgctgaaatcaatattaccgtcgtgattgagcacaccgccgttgatcagcttataaccgatggcgtttttcgcgatattgtcatcggttccgcctgatttcaggtgtgcttttgaggtcagagtggttttctctgattttttcccgatcgcattaccgttaatatcgtaatagttaccatcaatcaccgcgatggttccgccttcgccggtaacactgatggtggtctctttatccagaacaaccttaccgtccgccccggcaccattggccagatacagcccggtcgcgtctttcccgttaacattcagttgcatattgccggtttgtacttcagtaccgttatccgctatatagaaaccacggcttttttcaccattgatatcaaaggtataagttgtacctttgctgctgtcccccaggaactgcgctttctggtcaacacggaataacgtggaatcgttgttatccagtgtcagagcaacatcacttgcgccgaaattgatccgtgaactgaaggtttcatctgcccccttacgcccggcgatccagtaaccggtctggttaacggagtttttatcaaaaataacatggccgctgttaagatcgatttcaccgcccacacgggcaaagaccccgacggtgttattgcctttcagctcaacggttccgccatcgataatcactttcgcatcatccgcgcgtaccccggtggtgcgcgccggtttggtgccgccggtggtggttccgttattagtggcaatcacctgcccgtggtgagtaatcgtgctgtcgcccagcgccagcaggccgacagagcctgcaccggaaacattaatcgtgccgttgttttcgataacatccttgtcacggttagtacctgacacccgcataccgacagtattggtacccgccacgtcaatttcaccgttgttaacgactgtcagctgtgaatccgcattacggttcggtgttgatgccacgttaatgccgacagcattactgacacctttgttaatatcgattttaccggtattttcaatcgcatatttttcaccggcttttgcggtttcatccagcagtgcagccacggcgttcgacataatccgcatatcccaggtatcgtcctcacgaccgccggacaggctgacatcgtctttacccatcagaatatcgccgttattgataaatgaagcgcccttgacctgcacgccggtcacggttccttcatttttgccgatcccattctgccccagcagcagtttgccgcctttttcgttggtgaccagtgaaccgccggatgccgtcacgccggtgttagcaatcacatctttatctgtcggatcataattggcgaggttaaaggcttcaacggcaatggtgccaaggttggtatagcgggcattttcaccggtgacctgatcaccgtggatacgagttttaccgtcgcccagcagtaacgtgccggtgttggtaaattccgcattatcgattaacgcattctgccctttgtaattcggcacagaggttgtggcgtcatggaacactttcgcgccatcatgcgcaaaaatatgataagcacgataacggcctgaatttgatgaagtttcaccacgaatatccgcaccgtccttaatattcagcacactgccttcacctgcggcctcaaaaatggaacggtttccgatattggcggtaatggcatcattcagacggatatctttatcttccagatctttcaggtcgatattaacgtcaaaataatctttatcctgcggacgtgggacaaccgtcgcttcaatcagcgccttgtattccgccccgggtaatacgttatgtgttaccgcgtcaatcagtaacgcgttataggcagccagaccctgcgcatcaccgatagcaaaagtgtcaccaagagcatacgtttttcctttcgatgtgaacccgttcagctctttcgggatagtgacactctcaaccagttcattctgcgcctggaaggtgtatgtgtattcgcctgaggataacttcataccgtaggcttcaccgaacgtgacatgcagtttactggtggtatcaattgtcgcggattttccgctgtctgggccagccacaaacagtgagctgtctttgatgtaattaattttccagtcaacattgtcagccgctgtcatattcagcgtaccgtctttaacttctgccagtgtcagatgataaaacggggataattccggctgtttttccagcaaatagacacccaactgcggatcgatggtttttttgaaggcatcggtgttgtaggcctgcatgacggcgatttccccgtcttctttcttccaggtaatctcttccatcgcagacgggttgtccgggacctgccagtcttcaatcgcattcagggaagcgttccccggaagcgccactccatcacgatattcggtaatcgaaataaccttattttcaggtgtgttttttgcccataattcctgcaatgaaaaccaggtctcatgataatcaagattatttgtgaatttcgtcttttcgttatttaaattaagatctttaacactgccatcgttaataacccgggattgttctttctcgtttgaattatttacccacgttttagttgtgctgtcatattgtgcagggcgatactcagtttctaaccactgacccgcaggatcagctgccagcgcagatacgctcagcccgcttcccatcagcattgccagtgataacagcgccagttttttccctttctttgcaccctttgcgaattcagatgcgacaacagaattccctgtccgttgattttttacgactttgaatattttattcattgtttatttttctcaaaattgaaggacgtgaataaggaaattccaggtgcagaaaaccctgacgcatttaatgcatcacagaaaaaaatgtgccgtcacctgagcggctgacggttatcagcgtaattgggttatttaattaatttatttaacgttcacctgaattgccctgtatccggactcagaaaattttacttatggttgaatcggcggcgtattatagagaggggatttcgaatgtctatagcggttttaggaatcatcctaagcgaaattcactacaaaatgatcataaaaagataaataaccacaaaattacaaattggacgcgtaactacttataggtagtactgattatttttttgatttccctcacccgaatacagccaccatataaaatttaatgtggagataactaaaataattgaattcttagttgatatacaggtgaattcacagactcattaactaatcattttacaatgtataattcattcaatttgtttccaaacataacgtaatgcatacttccgttacattattgcgtgaatttttattcatgaaagatgaatttaaaaaactttagcttttttgggattattttttacaaaaagcacaaatagctcattttacgtattaaacgcgtacaaacgttaactcacaagcagctttcgtgatacaaatcacagtaaaataccgatcaattaataaacataaaacaaacataaaagtaacaaaaaagcactgccaacgggaaagcacctccgttatcattaagctaaattacttatttaaggtgtttaaagtaagagcattgccttatttaagccggttaaacacactgttttcgctatataaccaaaaatagcagtgaaaaatagcagcgcaggagaaacacaggagagcacttccccaagatcaaatacgcatttaatgcgtataacgatacaaacagcaggtactactcagatcgtaccccaaacaaatatcccttcaccagaaaatgcattttcatgcattaccgacctggatttgattcagttattatgcagcggtaaatagtacatttatgcgtaaaacaggttatttatgcggcaaaagtaagctctgttataataaggaggtgacaacaggtgacaggggaagcggacgcagcatgacgatttttgacacactggctgagcgccatattcaggcggcgcttgaaagcggagaattacagggactggcaggagaaggtaagccgctcacactggatgatgacagccatgttccccctgaactgcgggtgggctaccggttactgaaaaatgcaggatatcttcccccggcattactggcccggcaggaggcggtttcactggcggaattattgtccgctctgccgccggacagcacagaatatgagcagacaaacaagcggttacggttgctggcattacagatgcagcaggcggggctcaatacggattttctgtatcaccgttatcataacgccatacaacaggcactgaataaaaataaataatgcctgcacgtcagtacagttcataaatctgatcagatgtgaaaccccggtacatcaggtaacgcatctgtttttgcttctctttatagtcagccggtatgctctccccgaatttcttcatttttgcctcacgggcctgctcaaaccagtcggtctcctgcgcggaaaaaaccgtatcaatcaattcaccggaaaatcctttctgacgtaattcctgacggatccgcaccggcccgtgcagttttctcacaccggcctgaaaaaacagcacgatactgcgggtgtcatccagatactgtgagtctgtcagccgtgccatcacccgcggcagaacactctcttctgtcggggaggtttcctgcttttcagcaattttccgcttcagtttgcgggccagttccgcgccggcatattcccgccgccccagcagccatatggcataatgataaagttgtttttcatccatcgtgacacctgcgtgttatccgttaaaatcgtgataacataccatattcccactatattcagagagacagacaatggcacaactgaccccggaagaaaaagtatatgttgatgacctcgctatgcagcgggttgatgatatgaacagcgatgaatttctggttcgtcagctggatgacaaaatccacgggctggcatctcacctgaaagcctattttgaagaacgtctggctttccataaacagaacaaaaactgatcctgtccgggcagccgcaacgctgcccgctgcttttctcccgcccgaaataatcgccatataaataattacattcgttatcagtcgattccgatagttatcctgccgcacttaaaataaagttgaaaataattaaagttctctgtcattgtgccgataatcaataccggcagcatcctgagtgcttgattttgcgttgttaatagcgttaatgataattattcttaattattgcaatcaataattataaagaaaaaataatattaaatactgcgttttttaacatatattaaatgaatatttaaaaatattaacaacaatcaacgcataacatcgcaataacataaaaacacagtatataaaaccataagtaactatctgtatccggatattacagagaaaactcaccttttaattagtaaatcagaaaaatacttcaattaatcatttcatgactatatactctgtttcgttttagttatgccttccattctgatgtataagaaccttctttcccgttaacggtaataaaaaattaccggggaaattatttcttattaatgctactaactaaataaaccctgctgatttgttttttcagaatcggctaaaaatcactatgactaaaaataaatttacggaaagcgtaattaattccgtttccgtatttattatatattccatcccggagaggataatgaataaaaaattcgctcttgcagcgtctctttcccttatttttgttgctaactctgcgtctgcggcaactaccgcatccggtggttcaatcaatttcactggttttattactgatgctacctgcaccattaataacggtaatgcgaacatgtcggtattattagatccgattactgtcaatcagatcacacgttccggtgcaattgaggaaggaaaaaaagcattttctcttgaattatcagactgtaatgccagtgataaagataaaaaatcactgcatattaatttcgcatccaccaacctgattgccaataacggtaattacctgatcaaccaggaaacggatgagaaaggcaatcataaaaatgtcgggattgcgttaacatcacagaaaaatgatgaagttattaatttaaacacaccatatgatacaaaaatcattgctgataatggtgttatgcagttttatgcaaaatactacaaagtcggcagcgaaccggctcagccgggtaaaatcagcaccatgctgacatataacctgtcttacttctgatattttcaggcctctttaattcagaggcctgatttttgaaaatacatatcatgaaaaaaattatcttaacattgttgttattaacggtgacatttgtcagtccggcaaacgttattattaattccacccgtgttatttatccgcagggaagtaaagaggttccggtacaattatttaacaccggaacacagcaggcattagtccaggcatggattgatgacggcaaccccgattccacaccggaaacagctaatgtgccgtttatcctgacaccgccggtggtaaaaatcgacggtaaaaatggtcagcaactgcgggtgaaaatgaccccggtacagcttccggctgacagggagtccctgttttatctgaatttactggatattccgccactgccggaaaacagtgccgataaaaacatgatgcagattgctatccgctcccgcatcaaactgttttaccgcccttccggcctgacgctgagtgcggataaagcccacacccgtctgacattcacccgtgacggtcagcactatattctgaaaaatgattctccgtatcatattaatattctcggcctgaaagagaccgcgaacagccgtgatctggcggaagaaggcacgatgattgccccttattctcagtttacgctgccagccgcagccggattaccggccggaaatcactactcgctgacactgatcgacgatttcggtgccatcaatacctatccgctgtcactgaactgaacagccgcctgatgccgcgccctgtccgccgtttttccgcccttgtttcactgttgccggtgctgctcagcacaccggcagccggggccgggtttaataccaacttcctgtacggcgattccgccaaagcggatttgtcccgctttgatcgcgacgataccctgcccgacggtgaatacaccattgaaatcagtgtgaacggggaatggaagggacgatttccgctgcgtctgcagcagagcggacacacaattctgatcccgcaggatgatgtgccgaaactgggacttcgtgacagtacaccgccgccgcaggcagatgaagacggttatgtcgtgctgagcagtctggtgccgccggagagttataccctgaacaccggacagtttcagctggcactgaatgtgccgcaggcaatgctgaataccgtacttaaagggtatgtcgacccgtcacggtgggatcagggcattaatgccgcgatggtcagttataacgcaaactattatcacgccaccaataaacgtgacggcagtgataacgacaatgcttatctgaccctgagcagtggtctgaatctggcaggctggcagctgcgggatcaatcctcagtgacctacagcagcggacagagcacgcaatggaataacaacacccgttaccttcagcgtggttttccggcaatcaaatctgatttccgtgccggcgacagttacacctccaacgaactgttcgattctgtccgtttccgtggcgcaaccctgaaaacggatatgcgtatgtatcccgatgcctggcagggcttttccccggtcgtacgcggcgtggcacagaccaacgcactggtcaggatctatcaggattcacagcttatctggcagcagagcgtgccgcccggcccgtttgtggtcgattccctgctgccgaccggctccggcggggatctgcaggtggaagtaaatgaagcagacgggcaaattaaccgctttatggtgcccttctccgctgtgccgaatatgttaaaggaagggctctttaaatatgagctgaatgccggtgaagtccgtctgacggataccgcttatcatccggattttgtacagcttaatctccagtacggcattaataacacgctgaccggctacggcggggtgattgcggcggaaaattatcaggcgtttctgctcggcagcgggtttaacctgccgatcggtgcattatccgtggatatcacacactctgatgcccgcttcggtcaggacatgccgcgttaccggggcgagagctacaaagtggcttacagccgctttattcatcagaccaataccaatttttcactggcggcttaccgttattccaccagcggctatttcagcctgacggatgcggtgcagtatcaggaactgcttaaccggcagggtctcagcggcgatctctccccgcagtcacagagttaccgccagcgcagcacctttaatatcaacatcaaccagcggatcggcgcggattacggctcggtttatctcgccggtacactgcgtgattactggggcggtcagggcagcacccgtgaataccagctgggttatgccaataactggcaggatatcaattataccctcagcgcaggccggacccgttacagcaaagacagtaataatccggccggcagtaataataataatgaagagacgcggattaacctgacactctccgttccgctgaccctgtccggccacaaggtgtatctgaccgcaaacagcatgacggaagaaggccgctataagagcagtaatatcggcctgagcggtaccgcaggacagagcaacgcgctgagttataacgtgaatgccgcgcatcagcaatccggcggtaccaccttcagcaccagcgctgcttaccgggcagccccggcgacactgaacgcctcttacagtgagtccggccgttaccgccagctgggagccggagccaccggcagtgtggtggcctggtccggtggtattctcaccgcaaatcagccgggggaaacctttgctgtggtgaatgtgccgggtaccgccaatgccatcgtaaacaatgaccgtaatgtcaccaccaacacacagggtcaggtgctggtgccgtatctgtccgcttaccgcaaaaacgcgctgatcctggatgcctcacaggcaccggaagatgccgcggaactgctgggcaatgtgcaggatatcgtgccttacgccggggcggtgacactcgtgaacttcagaacggatacccggcaggaattttatctgcatgccgtgcgccgggacggcaggccgctgccgttcggtacagaagtcactgacggaaataataacagcatcggctatgtcgggcagaacagcctcctttatataagaagcgaaacgcggccggaacagatcaatgtccgcctgacagatacggacagcggctactgccgcatcacactcacgccggatccgcagagtgcgcctctgccctgtgcagaataaaggagacatcaccgatgctcaaaaaaacccatttttttgccggtctgctgatgctgatcaccggttatgcgcaggcggagtgctacaacgacggcaacaaacaggcgccgccgctgacggcggatctgtcggaaaccttttaccgtcagacagaaaccaccctctattttaatacccgctacagcggggaattcagctgtaacggctacagcagcagcgtctccaacgcctcttacctgcaaaaacgttccattgtggtcggttttcagaacggccgctatccggtcgagttccgggtaattgacctccagcccggcagcacccagaaattcgcttacagcaggaatccatacccggcggaccgccttcaggcacgtttcaccctcagtgcgcgggtgatgccgcagaactcacgcagtgatgtgacagtgcccggcagccagtaccgctttgacggtgcggtgatcgccgctgacaccacgcgggtcggcatccttcagttctttgtccgcctcggactggatatcctcacttatctgctgaccggacactggccggagcataatgaggatctgttcctgcaaccgctggatgtcatttatcagccccgtgaaaccacctgtacctttgataatgcggatttattagtcgagctgccgcaggtggacagagcacagctgctgcgtaacacaaccgccgggatgacacgtttccatctggatatctcctgccgggatcgcctgaacggccgcaccagccgtccggtaaaagcctatctggccagcaatcaggtctggctgcgggatatgaaaaccctcattgatacctcacagggcgcggcacagggtgtggggatccgggtcggtcgttatgcggataccaatgacaacagtgcactggtgatcaacccgccgggacggcagccgcgtgcggattcctatctgtttgaatggggaaaggacaaatttattgaagtaaataacggctttaatctctgggcgtattactatgtctatgatgccgcccggctcagtgcaggccgcatcaataccacggcaatcctcaatttcgagtactactaatcataaattctgataaaaatggccggtaaaaaccgcagaaaaaagtgaaaacagggcaggacaccgcgtaaaaaacattaattttccggataattccgccatttttgccaaaatccgcagccgtttgatgtccgttttaacttactaatagacatacataaaatcagaaaacagaattttatcctgccaaaacatacccgattaatattaaacgatggataataaggctggccttggtttttctattttgctagtattcgttcgatttttgttcagacaataaaacgaggaaaaagcaatgccctctctttcgatgaggacaaatgcagtcttcgctttcttgattttactattctttaccggttcgggctttgcctcaaccagtaccacgacaagcttggcgtattcacatcaaaacacgcagcagttacagaagacactgcctgatttgaaaaaatacgcgtcaggtacaccccgtaagaaagcgtttttaaatgccattgtccctgcgattgacaaagtgaatcgcgaaatcatgaatgaccgcacctggttactggaacgccggaatgccaaacactggtcacagagtgatattgcaaagctcggaaagctttgccggagctatgatatgacatgcagctcgcctaagcgcaccaactggaacgcgctgctgagccgtgtcgatatcctgcccacccacttcgttgccacacaggcggcaaccgagtcaggctggggaacatcaaaactggctcagtccaacaataacctttttggtatgcgttgcggacggggctgtagtgccaaagccggacaggttcagggctactacgcgtacagcactattgaggatagtgtcactgcttacatgaagaatctgaatacgcatcgtgcttataactcactgcgttcagaaagggcaaaacagcgtctgggtgatgatgactcactgagcacaccggaacttatcagtcagctggaaggttattcgcaaaagggagatgcttataaccgttacctccgccagatgtatgacagtaacaaaacactgatcacatcggcacagaaggtcgcccaaaactcataatcgttctgttcaccgtaacagacacccgaaaacccgcgttaatctgagtattacgcgggtttttttatgccttctcatcattcttattgaatcgtggttgataacttatattatactcagcacgctaattatgacattttcaacaagcctgcacagagcctgatatgaatttcttttcatttgaatttcttgcctcctttactgccttttttctgatttactggctctgtcaaaaaaagacccgtttacagaatatccttttaattacggcgagttatctgtttgtcttcttattccaggcaagcttcgcgtatgtgctggccggatataccctgtttatttatctgctgaccaatgtcctgagcagccgtctgtccgcacgggcagtgtacagcctgctggcggcggggatcatcggctgttttacggtattcaaatactacggatttatgcaggaatccctgcagagcgcactgctgcaggccggtgtggaggttgaactgccggtgctctccgtgctggcgccgctggggttatccttctacgcgttccattctgtcagctatgtggtgtcggtctgccgcaaagagattgaaaaagcgccctttttggatgtggtgctttatctctgcttcttcccgagcattgtcgccggcccgataaaccgcgccaaagcctttatgccgcaggtacaggcagcctcgcgggaaattattgattataaaaaagccctgctgctgatcaccctggcgatgttgaaactgtttttattcagtgcttatctgtcagaaaactttgccaacccggtcttcagttcgccggtcaactacagcgccggtgagattctggtggcggtgtacgcctatgcctggaatatctattttaacttctccggttataccaatctggtgaccgggattgccatgctgcttggtttcagggtaccgctgaacttcagtgcgccgtatcttgccaccaacctcaaagagttctgggcacgctggcacatcagtctgtcgacttttatccgcgattatatttatatcccgctcggcggtaaccgcaagggctggctgcggatgaacctcaacgcctttatcgcgatggtaatttccgggatctggcacggtgtcgggctgccgtttatcatctggggtgcactgcacggcctgggtattgtgctgatgaatatcaaacacaaactgctgccgccgcgcacagaacctgcggaaaccctgtggcagaaaaccggggtctggaccgcccggattttcaccttccatgtgctctgcctgacctggattttcttccgcagcgccacgctcagtgatgctgtcaccatgctgacgcaactgaccgctgacggctttattgcctctgtcatggccagtgcgccgctgattatcgccttctggctgctgctgtttatctatccgctgtgtgtcagcctgtatcaccgcgccggacactattaccagcggatctcatggatctggtatcctttaccgctcgcgctctttatgacgctggtctttattttctctccttcaggaatgccgggttttatctatgcgaatttttgattttacagaaaatctcgagcgggcactgaaggtcgtctttattgtgctgaccgcaaccgtggcactggtctggctgaaccagaacccgctggcccgttactgggaacagacctaccaccagcctgcgccgtgggcgaagctggaggggcattatgcgtgggatctggggggttaccttcaggaaggcgtggtggcggccggagagacgctgtggacctatgcacagggcaaccatatcgttgaggaagcggaagaggctgttcccggcaataccgcgtttccggaggagtttcaggtcgggctgcattttatcaacggctaccgttatccggctgctgcactgtctgtgaccttccctgagctgctgaaccgggagcgcccggcgatcggcagttctgtgctgaaactgaacccggaacaggttgcggaacacattctgacgaaaaaaacaccgaaatcaattattaatctggaagccggtgataaagtcttcttcgtgggcgattccctcatgcagggtgttgcgcctgtgttacaatcccgtctggccaaaacctacggcattgaaagtatcaacctcagcaaacagagtaccggcctgacgtatccgaagtttttcaactggccggaaactatcaaaaccacgctggcagccaacccggatattcgcctgatggtggttttcctcggcccgaatgacccgtgggacatgccgccggaaggtggcgggcgctatctgcgctttatgtctcctgagtgggaggcgcagtaccgtaaacggattcaggatattctgttaacggcccggatacaggatgtggacgtcatatggataggaccgccgaatatgcgcaaagacaagctgtcagatggtgtacactatctgagcggggtctatcagtcggaaattaacaatgccggtgaaatctggctgtccgcgaataccattttcaaatatcaggataagatctattcagactaccccggtgacggcagcagcactatcaagctgcgcagcggcgacggtattcactttacctacaaaggtcagaaagccatcgctgacacggtatttgatctgattaaatttaatgctgcgccggaggaaaccccggcggcgcaggaaaaaacagaaacacatgatgaaacaacaaaaacgcccgtcgtggcaccttaaactggccggtgcgggagccctgtttgccgcagcgctctccctgctctcctgccagaacgatgctgataagccgtggatacagccgcagacaccaccgccggtgtcgcgtaatgatctgaccaactacggcgatccgaacctcagccgcctggcgcaccgcctgcgggatccgtctgcgcgtgtccatattgtccagattggcgattcccatacagcagcggattttttctccggcacgctgcgtgacaaattccaggcgcgttacggcaatgcggggatcggctttgtaccgccgagcattatcgccggacagcgcacggcaaactttgtcttcaccgagccgaaaaaacagtggtcattcctgaccagccggaaagatgatgcgccaaacttcccgttaggcggttttgttatttcgccgctgacctcacacagcaccctgaccatgaaagagcgcaatccgtcctcttatcagtatgatatgcaggtgctgtaccagaccggctacccggcctccgttgcggtacgcggcggcaaaggcggcacgctgaacctggcaccgtcctcggagtggcgtttttctgacagtgtgccggtgaccttcccggcagaaatcaccgcgaatgagcagagtccgctgaatatcggcggctggtttatcacccgcaaccatccgggcgtgatgctctcgtctgtcggtatcaacggcgcgacgattgccatgacaggaaaatggcagtctcagtgggtgaataccctggcgcagaccgatccggaaatggtgatcctggcttacggtaccaatgaagcctttaatgacacgctggatttggatctctaccgtcagcaactgaccaatgtggtgcgcagtatccgcagcaacatgccggatgcggtgatcctgctggtcggcccgggtgacagtatcaaaaacaaaaccgcgcctgactgccgctcacagcagcctgccaatctgcacaatgtgatgcggatccagcagtctgtggcgaaaagtgaagggttgctctactgggactggcagcagttcatgggcggcgactgtgcaattaacagctgggtactgcgtgacctggcacggccggacaaagtccatctctccggtccgggttatgaaaagagcgcaacagcactctataacgccctggaatccctgctcagccagcagtaaccggttatccgcagataagctgattatctgcggatcctctcccctcagcagtttacgctgtgtcccagcacgccgatcatggcattctcattcacaaactgaatcattccattgtctttatcagtcagctccagcgctttgtcatcctctgacggcaccacaatgataaaacggctgccgttgcgctcagcattcctgcggcaggtactgatccgcatccccgagcagtcatttttaatggtgaaatgcgggaacagtgtccgcagacggcggccgaccatcagcgcatgcccggcggcacgggtgttttccgggatcagcaccacatcggtcgcgttctgacgcagcagttgcttgtgacatttgcggatcaggaaaataatcgggtcgagcataaacgcaaaaccgctgaccgccacctgtttatccagcagatgcgacgcactggcatcataacggccgccgcggcataacagctcatcgtggctgtcaggatgcgtggtgcgccattcaaacagggtgtgacagtaattattcaccggatacagtcccggcgtcacactgtacggaattttcaggcggttgagggattcgagcaactgacggaagcgggcggcggaagcctcagagagaaactcactgagccggggtgcttttttattaacgatatccagcagcttgtgcggtgtggataataactgctccggtttctctttcagtttaaccagccacggctcctcaaagaatggcagaaacggctgataatactctctcagtgcctgacgaaaacggctgaattcttcttcgctgccggcggtatttatttttaattcaatgtacggcgtgaggtgtaatgaactgaaaaaatcatactgcattaaaatatgttccagttcgatatcgatattatcgtagccgaatgcttccacaccgatctggtgatattgttcaaaatcctgtttctgcccggccacattccggaacatcgcaccgatataccataatttgctttttgactgtaaacgctggtgctgtgcaatcacccgcagacaccccatcgtaccctcaccgcgcagcagtgccggatggctgcagttgagtttggggccgttatggttatcatccgcaaacgctgcggcattcttcatatggtcatcccagtattccagcaccggaaagcggatctcctgatagcagtagcgcgccagcagcttagaggcgcggttttccagccagatccagtccgccacatcattactgtaatgtttgcgcggccgtccgctctgatgcgggcgtactgtccggttcacttcaaattccagtttctgacaatactgattggtgcccagcacgcaattctgattcagacagatttgaatacgctcaataacagactggctgatagtggtatataaaaaatgctgataatggatcccgcgctcttccggtgttttgcctaattgcaaataacactgatgttcagtcattctcggaatagtacattccccggtgttatgaccgtaactggaataatttaagttatgtttgtcattatattccgactggtcggatgtgaacgtatcaacatattgagagaccaaaagaaaataggagtttgcttcaataaggcagctgttataacgccgatcccataatgccccggtacgctgatatttattattgtagtaaggaacatactggcgtccgatgtgctgtataaagcggcttaaatcttcttttgattttggtgtcagcagcaacaataccgtatctgcctgaagtgaataggcatgaagctcgcaattgtatgattctaaagacctgtccacgcaggtcaggaagcgggcgtaatcattttcttcctgaaagagtttttcatgattgtgcccgttaagtttaatcagctgtggtaatcccgggaaataaaggcgctctcttcttggcataggtcagcgctccaatcgctaaaaataataaatttatctaatgagtaatataatataaaaccggttttattattttaactcatatcataaaacccgtttttatttttgaatgccattcttttttatcgtattgaaaaaagtatatttattttttacttacctgctttgttaattaacacatgacaaaagtaaaataataaccacaccagaagtccgattattcacgtcaaaaaagggggacagagtcacttactgcaaaacggcacataaaatattcattttcagctgaaactgttatagaagcgctgttttttttgatcgatatcaaatttagaacgacatttaaaaattaagtttcccgtatctcggtaattgtcatcgggtgcacctttccaattaaacaatcattacaggaaaagcattatgggaaacatgagtgccagttccgcccataaaatgggggtggtcgcgctgaccctggtaaccgcatcaaatatgatgggttccggtgtgttcatgctgccgactaacctcgcgggcgtcggttacatctccttatggggatggttatttacaatcattggtgttatcgcattagccttagttttcgccaaaaccagtcttatcacaccgcgtaacggcggtatcgtggctttcgccagcgatgctttcggtccgtttatcggtttccagaccactgtctgttactggatcagtgcctgggtcggtaacgtcgccctgctggttgccggtgtcggttacctcagctacttcttccctgaactgaaaaaccctgctatcggcagcgtcgttgctatcgcgattctgtggggcttcgtggtattagccagcttcggtgcccgtgtcgccggtcgtgcgcagtcattcactgcaagctgcatgctggttgttgttctgggtgtcggtgtgatcggctggttctggttcgatccgcagatgtttactcaagtttataacggtaccggtaaaagcgataccactgccattatcactgcggcatctatcgcgctgtggggcttcctgggtgttgaatctgctgtggtttccagcggccaggtcgataaacctgaatacactgttccgcgtgccaccgtgtatggtctgctgatcgcgtcagtctgctacgtcggcagctgcaccgttatcatgggtctggttccgcacgaagaactggttaactctgctgcaccgtttgcggatgctgcccgttacatgttcggtgaaactgccggtactgttgcctctatcctgagtatcatcgcctgcttcggttctatctccggctggttaatcctgcagtctgaaggtccgcgtgccggtgcaaaccagggtctgttccctaaattcttctccgatgtgaacaaaaatgacgttccgatgaaaagcctgattttcaccggtgtgctgatgagcctggtactgttaatgaccgcgtcaccaaacctggccaaacagttcgaaatcgtcatcctgatgtctgtcttcgcatctctgctgccatacatgtatgcactgatttctctgccaatcatcatggtttccaaaaaaatgaaccgcggcagcaccttcattttctataacgtcctggtggttatcggcattatctactgtgtctttgccctgttaggttccggttctgattctatgttctggggtctggtcatgatgtccatcactatcccgctgttcagcttcgtggccgccggccgtgcgaaaaaaggcaacgagattctgtacatcaacgacgaacaacacaaagcgtgatcagctccgcttcacagtcttaacttttgaaaaacaagaggtaattaagtatgactctgtctatcaatgatcaaaacaaacttgatgcattctgggcttattgcgtaaaaaaccagtatttcaacatcggttatcctgaatcagcggatttcgattacaccaacctggaacgtttcttacgtttctccatcaacaactgcggtgactggggcgaatattgcaactacctgctgaactctttcgatttcgagaaagaagtgatggagtatttcgcagacctgttcaaaattccgtttgaacaaagctggggttatgtgaccaacggcggtactgaaggtaacatgttcggttgctacctgggccgtgaaatcttccctgacggtactctgtactattcaaaagacactcactattccgttgcgaaaatcgttaaattactgcgtatcaaatctcaggttgttgaatctctgccaaacggcgaaatcgactatgacgatctgatgaaaaaaatcgctgacgataaagaagcgcatccgatcatcttcgctaacatcggtaccactgtccgcggtgctattgatgatatcgctgaaatccagaaacgcctgaaagcagccggtatcaaacgtgaagattactacctgcatgctgatgcggcactgagcggcatgatcctgccattcgttgatgatgcacagccattcacgtttgctgacggtatcgactcaatcggtgtttccggccacaaaatgattggttcaccaatcccttgcggtatcgttgttgcgaagaaagaaaacgtggatcgtatttctgttgaaatcgactacatctccgcacacgacaaaaccatcaccggttcacgtaacggtcacacaccactgatgctgtgggaagctatccgttcacactcaactgaagaatggaaacgccgcatcacccgcagtctggatatggctcagtacgctgttgaccgtatgcagaaagccggtatcaatgcatggcgcaacaaaaactccatcactgttgtgttcccttgcccgtcagaacgcgtctggagagaacattgcctggcaacgtccggcgacgtggctcacctgattaccaccgcgcaccatctggataccgcgcagatcgacaaactgatcgacgacgttatcgcggattttaacttacacgcggcataaaaaaaggcagtggtaattatccactgcccccttacggttcgttgccggcgcagacgccaatcctgccggcaacgctctctaacctatacagcgacacaggatgatgcaagaaaaaagaccaaaaaacacggctcagttctctgatcgtgagattttttgctccctcatccgcagctggagtatttctgtgaggacaaaatggtatggttcccaatggtaaatccacccaccgcatgggcctgacagccctgatcattatgacggcttccaatatgatgggaagcggcgtgtttatgttaccctcctccctcgcgcatatcggttccatcgcgctgtggggcggactgctgaccttctgcggcgtgctggcactggcgctggtgttcgccaagaccggtgaaatctccccctgtaaaggcggtgtgattgccaatatcggccggacattcgggcagtatatcgggttacagacatcacttttttactggctttcgacctggataggcaactgtgccttactgatctccggtgtcggttatctctcttatttctttccgcagcttcacactccgctttacgccgctattaccgcaattattattctctgggctttcgttctgctgggtttgcagggcgcaaaagtcgtcggctatgcgcagatttttaccggcctttgtatgctcaccgttattctgagcatcagtattttcggctggaccagttttgattacacacgttatatcaccagttttaatgttactcagaccagtaacacagatgctatttttgccgctgccgcgatttcgctgtggggctatctggggatcgaatccgcgtcggtttcatccgcccaggtgactaatccgcaccgcaatattccgctggcaaccattatcgggctggtgattgccgccgcctgctatctcagttccaccaatgtcatgatggggatcctgccccacgaacagcttgttaactccaccgcgccgtttgcggataccgcccgttatctgtggggcgaacatgcgggacagattatctctgcgctcgccattattgcctgcttcggtgcattaccgggctggcagattttacagactgaagttccccgctctgcggcggaagaaggcacattcccgcgtttttttgcagatgtgaaccgccacggcgtgccgtataaagggctgatttgtaccgccggaatgatgagcgccgtgctgctgctcaccatctcaccaagcctggaacagcagttccgcaacatcattattcttgcggtgtccgccagtctgatcccgtatgcgtttgctgtgatctccctgccgatcgccatgatcgccaaaaaaatgcagtacgggcgcacctttattatttacgccactctgagcctgattggtctgggattcattatggtcgcgctgacaggcgccggcaccaaaccgctgttctggggcatggtgctgcagatgtttaccattccgctgtatctgttttttattatgcgccgcgaaaaaaacactactgatccccgtcccgggctcgccctgtcgtacatcccggggatctgcgctgagcagaccgctgagatggcgttatcggctgacaatgatgacagccggaatttctcacagagaaactgtatatagaggactaaaaatggaaaagattcagtcaatcagagggatgagaagtgtgcttccggaagaaacaccggtctggcagtggctggaaaaccggatccggaatatcacttcccgctacggctatcaggaggtcaggctgccgattctggaaccggttgccctgtttgagcgcgcggtcggtgaatccaccgatatcgtctcaaaagagatgtataacttcctcgataaaagcggcgagcacatcaccctgcgtccggaaggtaccagtggttgcgtccggaccgtgattgagaacaacatgtgctacaacaccacgcagcgcctgtggtatcagggcccgatgttccgttatgagcgtccgcagaaaggccgtctgcgccagttcacccagttcggggtggaaaccttcggtatgccgggggcggatgtggatgcagagcttatctttatggtgaaagatatctttaaggcgctcggcgtggataaacacgtccgcctggagattaactccctcgggacaccggaagagcgctcagagcaccgtcagcagctggtgaattactttatgcagcacaaagcgctgctggatgaggacagcctgcgccgtctggaaaccaacccgctgcgtatcctggacagcaaaaacccggatatgcaggagatgattgaagcggcaccgcgcctgctggacttcctcggtgaggaatcacaacagcactttgatgatctgcgccgtctgctggacagtgaaaacattgcttatgtggtcaacccgcgtctggtccgcggactggattactacacccgtaccgtatttgagtggatcacggaagagctgggttcacaggggacagtctgcggcggcggccgttacgatggactggttgaattattcagcggcaaacagttaccggcttccgggtttgctatcgggatcgaacggctgttactgctgatccagaccctcggcctggataaagatattgtgaatcagccggatattgtggtgacttatgaagatccggcacagaatgtggaagcgctgttactggctaacacactacgccatcagttaccgcaatataaaatcctcaatgatttcaccagtgccaaactgaagcgtcagcacagcaatgcgctgaaatccggctgccgttacatcgtgacgctcaaccgtgacggacaggtcggcctgtgggatctggcggcgaacaccaatgaaaccctcaccgcagacaccctcgctaatgcgtttctgaataaaaccatcactgcgatggcctgataaacagcaacgtaatttaaataaaagcactgtttttacagtgctttttttgctttcaggcttttaccgtaaagtggaaatgataaaaatcactgcggcagatagccgtaccgtactccagcactctgcccagcttgtcgcggcttctgaggataattttcatcagtgaggccgtcggcggaatagaaagcagttttgcctcctccgctgtcgggtggcagatagagagagcatattcctgcacatccggctcaattccctgcgccagccagtgcgcatacagagaaccgtccagcagatcaggacgcggcagaaacgcctccgggataaacatggtttccagcgagaccggaatatcatccaccagccggacacgtttgatcaccgccatcgtatcacctgcggataattccagttccggggccagtgagtccggcacagagtccagctgacgaataagccagcggttggacaccttgccgctgccggcggcctgcgcggaaaaaccgccgccggacaggttgtactgcaccggcagattaatctgcgtgcctttgccgtgatgtttcaccaccaggccctgtttcagcagtaagtccagtgccttcaccaccgtcacgcgggatacccccagcgactgcgacaaacggcgttcagacggcagaacacaaccgtgcgtcagctgcttttgtgtgatggcttcttcaatcccttgttttagctgaagatataacggaacagttgattgctgatcaagcctgtgctgtaaaaaagtgagaaaatcatgttccacaaataggttcctgtcatgctgcggataacggctgaaaacagtgtagcaacttttgtgtccgctatcacatactgattaaaatcaattcaactggactacaactggacttatttgtcgtctattatatactctataaagacaaaggctccacagcagttttataccaataatatgatttgttgttcttaattcattcaacaccagtccagataataataaatgacacaatcagcagcagtcccgttaaatgtgacagaaaaacgtattctcggttgtctttacgggcaggcaaccggggacgccatgggcatgccgtcggaactctggccgaagagccgggtccgtcagcacttcggctggattgatactttcctgccgggccctgaagagaatattgccgccaacgagtttgttgccggggaatttaccgatgacaccagtcagtgtgttgccctgatggatgccattattgaggagcacggtgccgtcgtcccgcagacgatcgcccgtcacataatggcgtgggctacccggataaacgcgtttgaaaaaaatattctggggccgacatcaaaagctgcgctgaatgccatacaccagggaatacctttagataaaatagaggcaaatggtgtgaccaacggctccgcgatgcgtgtcgcgcccgtcggttgcctgatgccatcatataatacagatcgttttattgagcaggtcaggctctcctgtctgccgacccacaaatccgatatcgccattgccggtgctgttgtgattgcgcgggccgtcagtctggctgttgagggcacagactggtctgcgataaaacaggctgtcataccgctggctgacactgttcagcgccggtttgagtccaccttcagcccgctgctgggacggaggattatgtacgccctcaatgtggtccgcgggcgcacggacgaagagcaggcactgaccgatctctatgagatagtcggcgccggtatggataatattgagtctatcccgtgtgcaattgcactcgcggatttagccaacaccaatcccgtacgctgtgcggtactggctgcaaatctcggcggcgacacggacaccatcggtgccatggcgacggccatctgcggcgcaattcacggcattgacagttttgatgctgacagtatcgcattgataaatcatacaaataatatcgattttacgccgtatgcccgccgtctggcacagttcagacaggagtatgccgcgacgaacaggatgatgtcatgagtcagcaatctgtaccttcagcgttgaacaaaaccgatccgaccatcgaagaactggggatcggcctgatcccgccttcccggcagaccaaaaaacccgccgaactgttctttgtctggtgtgccgctaacatcggcatcctcggcgtggtctacggcgcgattattgtgtcgttcgggctgtccttctttcagtcggttttagcggcagtggttggtgtcgcctcctttattttagtggggatcaccagtatcgccggtaaaatcggccggaccaccacactcaccctctcccgcgccagcttcggcaaaagcggcaatatcgcgccgacggctttctgctggtttaacctgatgggctgggaagcggtgaatatcatcaccggcaccctgaccctggcggcgctgttcaccgccatcggactgggcagcggacacctgatgaccgccatcgcgctgatactgttcggcggactgacggtgctggtcagtattctcgggcagaacaccgttttgctgatgcagaaatggatcacgcggattttcggggccatgactctgtttgtcgtgctctggctgctggcgaccgcagactggcaggcgctgatcagccgtccttccggtaactggatcaccggcttcctgcctgcggtgtccattatcgccgccggaaccgggatcagctgggcgattgccggggcagattacagccgcgaccagagcccgtcctcatcccacagccgtattttcggctcggcggtcggcggggctgcactgccgctgttacttctgatcctgaccggtattctgctgaccgcgcaactgcctgatctggcagcggaagagaacccgatcgccgcaatcggcgggctgctgccgtcctggatggcggtgccgtatctggccgctgcggtggcggggattgtcactatcgcagtactcagcctctattccgccagtctcaacctgctgagcatgggcatcaaactcaaacagcgtaccgccgttgccctcgatggcgtgattgtgctggcgatcgcgatttatgttctgtttgtttccggtgatttcctcgggccgtttatttcattcctggtgttctgcggattgttcctcgcatcctgggcggcgatttttatcaccgattactactgcaaacacaaaaccgccggttacgacgaagtttcgctctacggcgacaccggggttatctggccgaccttcctgtgctggctcggcggctcggttgccgggctgctggtcaccaacaccggctttattaacggaccgtttgccaccggtgtgtttgagaattccagtctggggctgtttgtctccttcctggtgagcatggcggcgtaccgcctgacactgatgataaaaccggtacggagttaaacggaactgatggatgtaacattactgacaccacagcgcccggtcgtggttatcggcgcggctttcggcgatgtgatgctggaagtgaatgcactgccgcacagcggggatgatatcagcgccctgccgctcgggcagcagatcggcggctgcgcctttaatgtcgcccgcgcgctgagccgtctcggtattacaccggtcaatggcattcccgccggaaacggcagttggggaaaacaggtcaccgccgcgatggaaaaggaaaatctgccggttctgctgcgccatccgacgcacgataacggctggtgtctggcgctgggggaggaaagcaaagaacgcacattcatcaccatcgaaggctgtgagcagcactggagtgacgcgttgctcgcacaaattccggtgccggacaatgccctgatttatgtctccggttacgagctggtcagtccggaaagcgcgccgctgcgtaactggctgctggcacagagtgcggataaaaccctgtttgcggatttcggtccgcgtctgcgggacattgatccggactttattgaaaagctgctggcgaaaaagccgctgctgaccgtcaaccgtgacgaactggcacagctcaatccgcagggcggaaaacagtctgagatacagacagacgatgcacaggcgtttgccgacagctacggcctgccgctgatcgcccgcttcgataaagaaggcgctgtggtgtgtcagccgggacaacagccggtcagaatcccggcgtacaaggtgccggtggccgataccattgccgccggagacagtcactgcgccggcgttctcgccggactggcctgcggacaaccgctcacggatgccgtacggaccggtaatgcggtggcggccattgtggtcagccgcccgggctctgacggcgcccccacccgctctgaactgagtgagtttttacatcaccacctctgaaacaccgcccgtttacccgacagcgatgttcactcagcccccggattccgggggtttttctttcagtaactgatcgataccagcaaatcatcgatgttctcaatcacttcgcggctggcatcttccatggctgttaaatgcagttcttcatcatgaagtgagcccttcgcccgggcttccagtgccaggcgcccgaaaagatgccccagccggtgcggcctttccagtttccggtaggcatcatggccggtaaaccgctgcccttcgtccgcgtaataccatttgcccagacggcactgtgtatggtcattaaccgataaatccgtatttccgtccagcaggcggcggtagatatcccctttccagataacatgatccagtttgacggtattgagaaattgctgcaccgccacaaaccggatgatcgcctccatccgcgaggagctggtaatcatattctgtaaacgatcatccgcctgaaccgcaatattacggatacagctcaccagcttctggttatcttccgcatccgtataaatcgagtcggcatgtgactttattttgccggtaaaagcggtgatattgatggcttcgttctgaatttcgccggataattgttttatttcccgggcgataaccgaaaacccggcaccacggctgccgacatgggaagcttcaatcgctgagttaaccgccagcaggttcgtctggttggccaggcgttcgatattattaatgttctgattaatctgccccagcactgagatcagcttttgtgtgtaatcaagccctttatccgcgtgctcactgatatcatccagcacactgcacagctcctgcatgtagcagcgtgtttcactgttatgcagcgcgatttcatccagagtgccctgctccccggcaagccgggtgccggaatccagcagggagttgcggataatttctatcgccgccataccatccagcaaatgccggcacagaatctcaccgtgaacgtactgccgttcatcactgcctgccatcaccgcacgcgttgccggttccggaaaaaccgccggcaattcccggtggattgcgggctgtttcttttgcagaaaaaaccattttttcattatattcagcatgttaattccggttaagacagataacacaactcaggaaaatagcgcagattgccgccggggacacattaactatcggcggagaaaacagcggctgtatgcagacggcggggagtgataaaaacggcagcggattttaataacccgctgccggagcatgaaaacggcagtgttacaggaaggcgaagaacagcataccgacgagggccccggtggttcccaggatggtttccatcagcgtccaggtcttcagggtctgtgcttcggtggcaccggtaaatttaccgaacagccagaaaccggagtcgttcacgtggctcagcacaatagagccgcccgcgatacagacagacagagccgccagctgtgcgccggaatagcccagctcaccgataaccggcagtaccaggccgacggtggtcagacaggcaacggttgcagagccctggatcacacggacggcagcagagagaacaaaacaggcagcagcaatcggcagccccgcaccaatcagggattcccccagcgccggacccacaccggaatccaccagcacctgtttgaacacaccaccggcaccggtcaccagcaggataatcccggctggctgaatagcagcagaacagatttccatgactttattgcggctcatgccacggcggattgccaggccgtaaatcgccaccagacaggcaatcaggatcgccaggaacgggtgtccgataaacaccagccaggcgtgcagttttgaatccggatccaccatcggcgcggcaatggttttcagaccgaccagcaccagcgggaacagcaccagcgccaggctcaggccgaacgacggcattttactctgcccgatgctcggttcagtcaggtcttccggcagctccagggtgacaaatttactgataaagttaccgaacagggggcctgccagaatcatacccgggatcgccgcacacaggccgatcaggatcatccagccgaagtctgcattcatctggtctgccagcagcatcggggtcggtcccggcagcaggaaacaggcagcagccgccacaccggcaaacagcgggatagccaggcgcaccacattaccgccggtccggcgggcaacagcgaagaccacaccgatcagcagcacaatcgccacatcaaagaacagcggcagagcacagataagcccggcgatccccagcgcgtaatgcgcccgtttttcaccaaaggaattaagcagcttcacggctatctggtcgagtgcgccggtttcatgcaggattttgccgaacatcgccccgagcgcgaccactatcgccaggaaaccgagcgtgccgcccatgccgttctgcatggtctgagtgatctgctccagcggcatgccggagaacagccctgcgccgatagccacaatcatcagtgccacaaaggcgtgcagccgtgccaccatcaccaggaacagcagcagtaataccgacccggcggcggttaacaccagggttaatgttgtcatgactgacctccggaaacctgtctgataatctgaaccgcgcccgcaatcacatcctcaagcggcggctgaatgtccagcacctgtacatcctgctctgcggcagtgtccggtgcttctaaggtatcgaactgtgtgatcagcatttccggtttgaagaaatgccctttgcgggctttcaggcggctttcgatcagctcaaaatcccctttcagccagataaatgacaggtttttgttctgacggcgcaggatatcgcggtagctttttttcagcgccgaacagacaatcaccgaaagctcattggtccgctgcatagcaaaaatcgcgtcgttgatagctttcagccacggttcgcgatcggcatcattcagcgggtgcccggccgccattttttcgatattggcacgcggatgcaggtaatccccgtccagaaaggccgcattcagcccggtcgcaaccccgttagccacagcggattttccgcagccggaaacccccatcaaaacaaaggcgtgatgtggtttttggctatcactcataacaattcctcttatgcggtcattatcaccggatatgttaccggtaactattaccggtaacattaccaacggatatggttacaatgcaatcaaacactgttttcggatgaacaaattgtgacagttatctcaaatgaaattcctgtcacttcaggaagggccgggagccgttaaatactctctcccggtaataattcgaagccgacatccactatctgctgaggcggcagttcgccgcgcagacgcgccagcagcacttctgccgcacggcggcccatcaggtcacggggtgtgaggacactcgccagtttcggggtcatcacacggccgacatcatggccgtggaacccggcaaccgccagatcctgcgggatgcggatcccgagacgctgacactcaaaaacagcaccgatagcaaggtcatcgttggtacagaacagcccgtcagcatccggataatcagctctgacctgatgcagttgtcttgcccccagcgaatacgaggagctttcctgcgtcatcacattgcccggttcaagcccggcatcccgcatggcctgttcatacccctgaaggcgcatgaatgtccgttcgtcatgacgtgcgccgagataaatcacacggcggcagccgcgtgcaatcatagcccgtgtcatttcaaatgacgcgagccggttatccagcccgacagcggaatcatagcagggagagacgctgtccatcagctcaaccaccggaataccggcggtggccagcattttcagggtgcgcggggtgtgggtacgttcggccaggatcaggccgtcgatattgtaggacaacagggagaccaggcgatcttcttctttctccgcctggtagccgtagtgcgccagcattgtctgataaccggcggcatccgtcacggtttcgataccgcggatcacttccgcaaatacctggttggtcagcgagggcagcagcacgccgatagcccggctggtggcgttggataaaatatccggcacccggttcggaatataccccagttcatccagggtacgggcaatcgtgccgcgcagtttttcggaaacctgttcggggttacgcaaaaagcggctgatagtcattttggttacaccaacgcggtcagccacgtcctgtaacgaagggcgttttttcttcatagtgcttatcttaatacagactggtctgtgtgtcgtcatatccgccgaaagaggccgtagttataccgtattccgcccggaattttaccttgttttgacttacttccctatttaccgctgattttattgactcacctcatgctctgcgctaacgtcccgctgtataacaatacatataacgataatgacgactgatcacgatgacacttaaccgcctctgctccggatttcttttctgctgcgcactgctgttcactttcccggcattgtcagccgctgccgcgccggaaaccgcctctcaggtctttatttatggtcagcttccgccgccggaagctattcaccgtgtggtcagcagcggcccgccgactgatcagctgcagtttgcggtcgccccggaaaaactgccgggctttgcctctctgtcggtaaaaaataacccgtattttgcgccccgctggcgcgcgctgccggtcaccggacgactctccggacgcggcagtaccctctcccctgaaaccctgctggcactggcgccggatgtgattgttgacagcgggctgaccgatgacacttaccgctcacaggccgcccgtttcagccgccagaccggcattccgtatattctgttgtccggcaatctgacacaaaccccggatctgctgcgtcaggccggtgcactgctgggggaagcagaacgcacggagcagcaggcacagctggcagagaaatggctgcgggatgctgccgcttttgccgatcgtcagacacacaaacgccgtttttatctggctcgcggcgcgaaaggcctgcaaaccggtctgcgcggttcgattcacagcgaagctccggaattactggggtttgagaatgtcgcggatgtcccggatatgcagggactggcggaagtctctttcgagcagttactgcagtggaacccggattttattatcgcccaggatgccgtgacatatgacgccattatgcagggtgaggtctggcagagcctggatgcggtgaagaataaacaggtcttttactatgccgggctgccgttcggctggctcgacagcccgccgggactgaaccggcttttagggctgcgccgccttcaggcacagtttgaaccggagagtgccgatctgaaagcagacaccggtttgtttttcagtctgttctatcactctccgctatcggaggcacagattaacagtctgttatccgcccgatgaccacctccgccaaaactctgttactgcttgtgctgctggtgctggtcaccggcattgctctgaatgttggtaagttctcactgactccgcagcaactgtgggatgtggtgcaggcgaaaatcaccggcaacagcggcgcggatgatccggcgctgagccgcgatatgacagtcttctggcaaatccgtctgccgcgcattgccgccgcactgattatcggcggcggactggcgatagccggggcggcgtatcagggcatgttccgtaacccgctggtttcaccggatattctgggtgtttccgccggtgccggggttggtgcgatcctcgggatttttgcaggtcagtcaatgctcactatccagctgttcgcctttaccggcgggctgtgtgtggttgccctggtctattctgtcgcccggctggcgcgtcagcatgatccggtactggcgctggtgctggtcgggatcgctgtcagtgccctgtgcggctcggccatttccctgatgaaaattctggccgacccctatacccagctgcccgccatgaccttctggctgctcggcggtctgtccgcgatttcaccggatgatattaaaaccaccgccccgctgattttcgccgggatggtgccgcttctgctgctgcgctggcgcatgaatctgctcagcctgagtgatgaggaagcccgtgcactcgggctgaatgtctccgtgacgcggctgatttttattgcctccgccaccctgatcactgccagtgcggtctctgtcgcggggattatcggctggctcgggctgattgtcccgcatatcacccgtttgttagtgggtgctaacttcagccaccagttgccggtgtcactgctgatcggcgccatcatgctgctgctgacagacacactggcacgcaccattgccccgattgaactgccgctcggcattctgacctctgcggtcggtgcacctttctttatttttctgctgttgcagacccggaggaacggatgagtgatgtcctgaccacccgcggcctggcggtcggctacggagagaagttaatactcactgacataaatctgcaattacatcagggagaaattatctgtctgctcggtgccaacggctgcggcaaaaccacactgatgaaaaccctgctcggcctgctgccgccgaaggccggggagatcagcattgataacacaccgctgcgtgactggagtgccgccgcactcgcccgccgcgttgcctatgtgccgcaggcgcataatatgccgttttctttccgtgtggcggatatggtcgcactcggacgcagcgcccacctctccctgtttgccgccccgggacgcgccgaacggcagatggcagagcaggagctggatcacctggggatcgcccatctggcacagcgctcctattcctgcctgagcggcggggaaaaacagctggtactgattgcccgcgccctggtacaacagccggggctgctgattatggatgaaccggcggccagcctggacttcggcaaccaaataaaattactgaataaaatcgaacagttacgtgagagagggatcaccgtgctgatgtccacccaccacccgcagcatgcggcggccgtggcggacagcattgtgatgctcagcaaagacagccccgcctgccaggacaaacctgccgcgctgctcacaccggaaaccctggcggcactctatcatgtgacaccagaacatattgctgcccacttcgcgcagccagcttataagggatgctcatgactattgatgatatcgatttcgcacaactctaccgcgaccatctcgcacaggccgaacgtacccgcaaagatccggaacactgggataaacgtgcagagaaaatggcacaaaacggtgcgaaccccgccgatccgtacctgatccgctttaaagagattgtcgataccaccggcgcgaaaactctgctggatgtcggctgcggaccgggctctgtcgcgttgcagctggcagacagctttgagcaggtcaccggtattgattacagcgaaggaatgctgaaagtcgcgcgccagcgggcagagactctgggctgctcacacgtcaccttccgccactgcgcctgggaagacgactggtctgcactgccaccgtgcgatatcgctgtggcttcccgctccacgctggtgatggatttacaggccgcgctgctgaaactgaaccgccacgcgcggctgcgggtttacaccacccacactgtcggcccgacatttgtcgatatccgcgttatccgcgccatcggccgcacgccggtcacactgccgacctatatttacgcggtgaatattctcaaccagctcggcattcatcccgatgtggaatttatccgcagcccgaactgccagagccgcgacaatatgacctttgagcagtttgccgaaggtgtgatctggtcgctgggacagcttgatgaccatgaaatgactctgctgcgccgctattacgaccagcaggcggctgacggcctgccggtggtaccggccacccgcgactgggccctggtttcctggagtgtggtaccggaatccgccctgctgctgccgggaggtcagaagtgatctactacagtgatgcctttctggacagccttctgctggaggacatccattacggcgatctcaccacccgcgcactcggcatcggcgcacaaagcggggaaatgcacttttcccgcaaacaggccggttatgtcagcgggctgacattgggtcagaaattactggaaaaactcggcttacagacacaattacacgctaatgacggcgatcatacggaagcaggcgctctgctgctgaccgcaaccggccgtgcggaagcactgcatcagggctggaagattgtccagaatgtgattgagtggagcagcggcgtgacacagatgacccgctgcatggtgaatactattagtcagtatcagccggacgcacagctggcctgcacccgtaaaaatatccccggcaccaagttactggcaaccgctgctgtactggccgggaaaggcatcattcaccgtcagggctgcgcggaaactattctgctgtttgccaatcaccgccgtttcctggcagagccggaaaactggtgtgcggcgattgcggcactgcgccgtgaggccccggaaaagaccattattgctgaggcggacaatccggatgaagcttatcaggcgctgaaaggccgcccggatgtgctgcaactggataaattcagtcctgatgatatccgccgtctcgtcaaagacgcggcggtgctggcaccgggctgcacactgtctgccgcaggcgggctgaatgcagagaccatcgggcagtatgcggataccggcgtgaagctgtttgtcacatccgccccgtattatgcatccccggcggatattaaagtccggttatatccgcgctgacggaaaaccgcacaaccttatagtgagttaagggataaaccggtcaggtcactgaaccggccgttttatccttttgttttgcaagtcgttatataaataaatacatatcggtaacaggaaaaacaacaatgaaacgaactctactctgctcagctattctgctggcaaccgcgcctgcggtacaggcagaaagcgcagatattctgaccgtctggggcagcccggtggcctccaatccggatgtcatcacacagccgcagatgcagtcgctgaacaaaaccaacgcggcgacagctatcagcaccatgccgggtgtggttctcgaaaaatccggcaaccgtaatgagctgacggtgaaagtccgtggttttgacagccgccaggtgccggtgttcttcgacgggatcccgacttatgtcccgtatgacggcaaccttgacctcggccgctttatgaccagcgagctggaaagtattgaggtgagcaaaggttatacctcactgttacagggcccgaacctgatgggcggtgctatcaacctcaccaccgccaccccgaaaaaaccgtttgaggccaatgtgtcattcagccagggcttcgcacgcggcgcggataatgcctataacaccagcgcccgtgtcggcgcacgcagcgacctcgggtttatccaggtcagcggcagccagtacaaacagcgtttcctcggcctgcctggctccgatgatgataatgccctggcaggcagcaacggccgccgtgcgcactcctcatccgatgataaacgcggcatggtgaaagtgggctggaccccgcgtgaaaccgaccagtatgtctttacttatctgaagcaggacggcagcaaagacagttcgccgtctgcgaaaaaagtcacaaactgggcatggtgggaatggccggattacaacaaagaaagtttttactttaacagtaccacccaggtcactgacggtattaaccttcaggggcgcctgttccacgataagtttgaaaatacgctgtatatgtaccagaacccgaaaccgggcaaaaaaccacaggacggctacagccgttatgatgatttcagcaatggcgcctctctccagttaggaatcgacatgcgggagaatgacctgctctcgttctccgcacactggaaagatgatgtccaccgcgctcagaaagagaaaggcggtgactggctgcgttataaagaccgcacctactccgtggcgacagagtatcagtgggctgccactcaggacctggatattatcggtgccatcggttatgactggcgtgacagccgccaggtggataagggcgcggatgataacagccagcatgcctttaactgggaactgatgtcgaaatacacctttgccaaccaggacaatatgcggttctctgtctctgaccgcagccgtttccctactcagaaagaacgttataccactgaaaaaccgggtaaaaatgaagaagctattattaacccgaatctgaaagcagagcgtgcactgacctttgatttaacctacgaaggcaatataacggataaatggggttatcaggccagcctgtaccataaccgtgtggatgacgcgattatgacccgctatgttggtataacaccggacggacgccgtattggtcagtcacggaacagcggccgggctgattacaccgggttggatctgggtgtgaaaggtgaagtgagcgactggctgaaaaccgggatcaactacagctatatccacagtgatccgaaagatgttgatcatgttgaaggtttaccaaaacaaaaagtctatgcatgggtaaaagtctcgccgatcgagccgctgacgatcaccctggcagaagagttccgcgcgtggagctatcagtataacgacagcaacgacaaagtggccggttatgctcttaccgacctgcgcgtggattatgacttcggttacggcatttccgccaatgcctccgtcaataacctgtttgataaatcctacgagtacaccaacggctatatggaagaaggccgtaacttctggctgggcgtggaataccgctattaatcgtccggttcagtaacctgtcacaggcagcccggtcagtaatcgggctgcttttccggcagatgttttatctccgaacaggcaaacccgtaaccaccccggcaggattcctgaatcagccagcggccgtaacggtaattgcgccgcaggtgaaccccctccagatagagatttccgagaacatacattgctcccgggtgccttttctcccgcgcggcattgaaatactccaccgctttttccatctcctccggagtccgctccctgcccatataaatcatgcccagcgcatactgtgcttcggcatccccctgctctgcctgtatttccagctgcgggatatccgtgttctgccacggtgcacagactgcggcagatgtcagaaacagtgtcagtatcagtccgtaacggtatttcatcatgctctccctgtcgtattcctgcatccgttcctgactatgatgcacaaaaaacgcccccgtttccgggggcgctgtctgttttatgttgtctttctggtatcagactgacggggagagtgtcattccgccgcccgccgcttcccggcggttgatctgacgcagcaggaaggttgccaccacaccgagcagtgcacaggcgaccgaaagcataaagatatagctgtagccggtttcaccgtatttatccagccagtagccggcaacggaataatagaacgcgtccggggaaaagccgataaaggaggcaaaacccaccaccgcaccggtggttttcatcgggattttcgattctgcaacagaggcaaaatagataccacggaaggcaaacagtaacgcactcagtaccaccatattcaccaccgcgaaccacataaaggcgttacctttcgggatcacgaggaacagagcacagttcacggccatgataataaagccgacaaacatcacgctgatagatgatccgactttatccgtcacgatccccgccaccggagaggccaccattttgatcacataggtgcggataatcgacagcgccgtcaccagggtaatcggtaccacatacacctgtgacagatacgggctgagatacgtcaggctggagaacaccacataagtggagaaaataatcagcccgatcagccacgccttcggcatcgtcaccacactcatcagcgagcggaatgtggttttttcttccggttcgccgctgtcagtggtactgctgcggtgcgcgatcaggaagaacagcagcacgccgcagatcaccgaggcgccggagtaaagccagaccacataacggaagccgattgccgcctcggcgaatttgccgaagaaatagagaccggtgaacgagatcagtgtaccggatacgccggataatccttcgtaaaacccgaagatccgcccctgctctttctccgtgccctgcatccgcaccactttgatcgatgcggcgaagaacgtcaggatcgtcgtgacaccccacagaatgtggatcagcaggatcgtgttatacgacgggaaggtcgcgaaccagaatcccagtgacccggaggcgatcagcgagaaggtgatcaggttgcgcagtgaaaaacggtccgcaaaccagccgccgaaaaagtaggaaaacataccgatcaggccatacaggctgagcaggttaccgatctcaatatgtgtcagccccagcgcctgctgcatcggatcatagaacgaagacttcaggtaaggcaggctgtacattgctgtggtaccgaatgccagcagaaacagaatcagcatccgtctgacgcgggattgatttgccatgtgatttgccataattattatctctttttatcagccgtgaactgcatccagggcctggcggaaatccgcaataatgtcttttgctgattcaagtccgacagcaatacggatcaggttttcgccgttcatctggaccagggtgtgctcttcacccagactggtggcaatggtggtcagtttcagggagttcacaaatttgcggctcacctggtcgtgggtcaggccgtgaatgtcctctttcagacggaaagagacaataccgccgccgaggccgttcatctgagactgacacagttcataatgcggatgatttttcagtgccgggtagcggacttcttcaatttcgctctgagatgtcaggaactccgccagtgccaggccgttttcacagtgttttttcatccgcatatcgagggttttcatcccgcgcataatcatccaggcgttgtttggtgccagtgccgcgccggtaaagcagcatagtcccggccatttgatcagttcgatcagctcgcgggagccgataaccgcgccgcccagggtatcaccgtggccgttcataaacttggtcaggctgtgaaccaccagatctgcacccagctccagcggacgttgcaggatcggcgtacagaaggtgctgtcaacaatcagcaggcttttgttctgatgggcaatgtccgccaccgcgcggatatccaccagctccagagacggattgagcgggctttccacatacacgagttttgtcgccggtttcatggcagcgcggatattgtcactgaccgtggcatcaacaaaagtgatttccacgccgaatttcgccagcagttctgtcatcagcagccgggtgtgggagaagatcccgtccgcgctgacaatatgatcaccggttttcaccagtgacagcagggttgaggcaatcgcccccatgccggatgcgctgacaatcgcactgtccgccccttccagcatcgccagtttgctttccagctcggtcaggttcgggttgcactcgcggctgtagacatagccccatgtccggcacaattcttcaaaatgctccacagaatgcgccgcaaatgtggcagtctggtagataggactggccagcgcgccggtggccggatccggtgaatgaccctggtggatcagtttggtttccaaatcataatcagtatttttttgcacaacagactcctcatgagatcagcactctgatccgcatgtcatcatttattatcattagtgagttcgggttgctgattcaggatcagcgggggtaatagtgtggcggtaacgacctttttaaccattgctgtaatgtggataactatagactctccagctactatagagtcaattcagagatagtagatgcgcatcacaaaacgggtaattatacggtggagaaaagcaaaacaggctgaaaaatatcagcctgtttctgtattgaaagcattaatacctatagcagagggagagttttacaccaggcagcgggtgtcaatttcacgccgtttcactttgatctggatttctgtcagcaactggcgctgatcattggtggaaagcgggtcaatcaccgggatttcatacatcatgtcatccaccggaatgcgtttgtattccgcataatccgtcagcgctttaaatgctgccgtattttcgctgtaaggcccctgatacatcaggcagataaattcaccgtcaggaatttctgtaattttgtcctgcacctgcggattaaacaggtcgcgctcgacaatcacaaaactgttcagataatgcacctgctgtgtggccagaaattcttcgcgggagaccagaccactgacgccgccgtagaaaatagaaatgttttcctcgaggatattggcaatctgccgccgtgagaactccatggtctcctcaaagctcagaccgggctcataattcatcgataaaatatgacggcgcggaatataacggcgggtgattttgccgatgctgtcggtatcaatccccttctccagcgtctcttttttggtggagaggacttttttaatcagctcgagctcgcggattttctcatccaccacggaaattttccgggtcagcaggctgaggatctgtgtgtcgctgtcttccaggcggtgtttgatctccttcagcggcatacccaggtatttcagatacttaataatatccagctgagaaaactgatcgatagtgtaatagcggtagttactttcctgatcgacatacaccgggcggaacagccccagctggtcataataacgcagtgtctgaatgctgattttatggagctttgccatctcaccgatggaaaaatatttcgccatattgtgccgcctctgatgaacgtctcaggaattaaccggcggcacaataacggaaacaagggggatggtgcaaggtgtcagatcacactcccggcggttcgcgggagacactgttgcgttccatatagagtgtccggctcgggaaagcaaagtccgcaccgttgcggtgcacaatctcaattatcttcagatacaccgcctgctgtgctgccagccactccgcccagaccgtggttttggtaaagcagtacaccataatattgagggcggaatcaccgaattcatcaaaatagaccagcaatgtctggtgctgatcaatgctgctctccgctttcagcatagcgcgtatttcactgacaatctgtgaaattttctccgcatcctcatagcgcagcccgatggtggttttgatccgccggttggtcatgcgtcccgggttttccacactgatggaggagaacagcgagttcggaatatagagcgggcggtgatcaaaggtaatgattttggtgatacgccagccgatttccaccaccgtcccttctatctgccggtcaggcgaactgacccagtcaccgattttaaacggacggtcaaaatagagcataatgccggaaaacaggttgctgagaatatccttccccgccataccgatggcaataccgccgataccgccgaaggtcagcaggccggacaggctcatgccgaagtgttcgccgtagaacaggaacaccacaatcacaatcaggattttcagtacgcgggagacaatatgtgccgaggtgatatcactgccgcgtttgatctgtgcggcggccaggcggtttatcatcaggaacagcttgcggatcagcatcagcacaatcagcgtggtacagatcatcccgaccgtatctgcggtgataaaacgccactgaaagtggtcaatcccctgttcggcgaaatccccgaggataatgacacccagcgcccacatgataaactgggaaacatgtactaatgtggcatgctcgcccttttcccgtttacggttataaatcatcagcccgccggaaccgagcagacacagcaccagcacaatcaggctgagcacattattggagagaaactcttcggtaatcacgataactccttagtattatcctctccttctaacggattttgcccggaaactcaatttatcctgccggaaagttcagggttaatattccagtaaccggttaaacagcagactttgcatatcctgccgctggtggattaatacatgagcagtaacataatgttcattcaaattattttttaatactgaataaaatatccggtaaccattccgcgataaaaactcccggtatttactaacacccaagtcacgcagcatgccggaaacttcgcagatttccggataaggtgtcagcttctgttcaaaatcatcaatgagttctgcgatggattgtttttccagacggctgtttttagcagaaataacaaaggtttcagtataataaaaacggacagacataattaatccgattgttaattataaattatctagtaattgctcgcgtgaatacacatttccgtctttactgtctttctcggaaagcgttaataacttaagtaaggctatcgcctcatctcttttttttctttcctcatatgattcaattacatatgcaggaagcccattttgggttactaaaataggttctgataattccagagttgctgcatgcttttttatataactgattgtctctattttcacagaaacctccattaacgaaacttaaacggagtaaatttttcactcactatggtctgataagaccgtttatagtctgaatatagtctaccatcaggcacaagacaagactgcatggggacaatatatgccccataactgtttttatttaaactgcacatccggaacggtggtgacttcggcttcattttcaacgctgaagttgggcttgccggtgtatcccatatagtcagcaataatcacggccgggaatttccggatggtggtgttgtattcacggacactttcgatataacggccgcgtgccacggcgatccggttttcactgccctccagctgtaccattaagtcgctgtagagtgcgttacttttcagatccggatagcgttctgatactgccagcaggcgggagagcgaagagccgagttcagtctgcgcctgctggaatttggcgagcagcgccgggtcactcaggtcactgacattgatattcatctgcccgacttttgcccgtgcattcaccacatcctgtaagacctgacgttcaaagtcagaggaagcctgcacggttttcaccaggttagggatcagatccgcgcggcgtttgtattggttgagcatttcagaggcggatgcggtcaccgcttcgtcctgtgtctggatgctgttgtaattggagaccagcagtacgccgaccagcaccaccacacccagtaatccgataatcagttgtttcatcgtattttccttatctcagtggcgactattattcaggcaatccgccggggattcaagataaggatgaaagagtaaaaccggggatcggggattacggtgcctgtaccggcaacgggcaaaaacagaaagtctctgtaaatacgtccgtattatacgctaaatcattccgttcagagcaag

SEQ ID NO: 68 - DNA, 40480 bp, unknown
  Altogen 322075 strain
acatttggggattacagtgcctgcaccggcaacgggcaaaaacagaaagtctccgtaaatacgtccgtattatacgctaactcattccgttcagagcaaggcggcaagtgaagacatttggggattacagtgcctgcaccggcaacgggcaaaaacagaaagtcgctgtaaacacttccgtgtgcgctcaggctcgccatccatggcccgcatgctttctgttttctttgcccgtcacctgtgcccatagatattaatacgctaaatcatttcgttcagagcaaggcggcaaagtgaggacatccggggagcatacataagtatgtaacccggatagacgaacgaagccaacaccgctatggacggaagcatggcgcggatacgttaaatcattccgttcagagcaaggcggcaagtgaaggggcacggggagcatacatcagtatgtggcccgtgcccctgaatgcggccaacgccgctatggacggaaggatgacgcgtatttaccaggcccggacagcatcgcccttataaacttcatccgcctttttcagaacctcatcactctggaacgccgcgaccagttttttcagcttctcattgtctttatctgctgctctgaccacaatcaggttcacatacggggaatcagccccttccataaacagaccgtcacgtgcggcggataatccgacctgagatgagaagttattgttgataatggagagatacacatccggatcatccagggtgcgtgtcagttgcggggtgtctatttccgcaaacttcagtttcttcggattttcaatgatatccagggtggtcggcagataaccgacgccgtctttcagtttaatcagcccctgagcctgtaacagcagcaggctgcggccgagcgtggtggcttcgttagagatagccactgttgcaccgtccggcagttcggctgcggatttgattttctttgagtatgccgctatcgggaagataaaggttttaccaataacttcaaactgatagccacgttctttgctttgcgcctcatagtacggcacggtctggaacgcattggcatccacatcactgttgcgcagcgcttcattcggcaggacatagtcattgaaggcgataacatcaacatccagcccctgcttctccttagcgactttgaccacttcttcccagatagcctgatccggcccggtgttaatcgccactttcagtggtttttcatcgtcattctgcgagcaggacacggccagtaatgtggtgcaggcgagcagtgccgatacaataatttttctcatgctatctccggaacatattgttatagttatattttattgactattaatattatttcgcactgtccagtgccgcactgatatccgccaggatgtcatcaatgtgctcgataccgatggataaccggatcatatcctgtgataccccggcacgggccagttcggcctcattcagctggcggtgagtggtggtggccggatggcaggccagggatttcgcatcaccgatattgaccagacggacaatcagtttcagggcatcgataaacttcgcccccgcttctgccccgcctttgatgccgaaagacataatcgatgccggcgtacctttcacgtatttttttgccagtgcatgttcaggactatctgccagacccgcatatttcacccacgcaacctgcggatgttgttgcaggtattgcgcaacacgcagggcattttcggtatgacgttccatgcgcagcgccagtgtttccagtccctgcagaatcagaaagctgttaaacggcgacagtgctgcaccggtattacgcagtggcgcgacgcggcagcgggcgataaatgcagctgcaccgaagtgttcactgtagttcacgccgtgataggaaggatcaggggtattcagaaccgcaaagcgatcagcatgctgctgccacgggaattttccggagtcgataacaatcccgcccagtgacgaaccgtgtccgccgatatatttagtcagtgaatgcaccacgatatccgcaccgaactcaatcgggcggcacagcgccggagaggcaaccgtgttatcgacaatcagcggaacgccgtggcggtgagcgatttctgccagtttttcaatatccgcgatatgtcccgccgggttggaaatggtttcgcagaaaacggctttggtattgtcatcaatcagggattccagctgtgcgaaatcatcatgatcagcaaaacggacgtcgatcccgatgcgcggaaaattatgcgcaaacaaattatacgtgccgccatagagtttggagacactgataatattgtcgccaacccccgccagggtctggatcgcataggtgatcgccgccatgcccgatgccaccgccagcccggcaattccgccctccagagccgccacacgctgctccagcacatcattggtcgggttcatgatgcgggtgtagatattccctgggactttcagatcaaacaaatccgcgccgtgctgtgtgtcatcaaaggcataggaggtggtctgatagataggaaccgcgacggatttggtggtcggatccggtgaataaccggcatggacagagagcgtttcaagtttcatgtgttcttccttaccgcacaggtgaatatttttatttagacgtccagacgtttagacattcctttgttataccggtattcactgccgggatcaaaacggaagtggcaaaacatgatgaattttcttcatgatgagaaagaacatgaaaaagccgctgtcagaagcggcccggatttatgagcagagaagagattatgtccgcatattattaagcaaattaccagatgtcgcctgcttgttatcaagataacggttaaacatatccattacttttttatttaattcatgcgcgttatcagacgctttaccatgaacggatccacttttcagcttcagatctttttgcgcgcgaacaacttcagcatcaccttgtaactcagtaacctgcttctgaatgaattgtacgaatacctggctaaccggctgtgacagtccggacatggcctgtcccgctattccgccgggtgtcggtgccgtcggattagccacatcaatcccctttattgacatagcagcaccgacaatagaaataccaatagaaactaacgcaccggtgacggctgctttgacctgaagttcggcttccttatatttcatattttttaattcttttgccagttcaataacagctacatccagcttattctggcgttcctgctggctcagtgaatcatcattcagtactttgcataattctatggctaatttcatccatttctgatcactgacagataacagagagggcatcagcgatcctgcacgggtacggatctcagcagaaatctgctcatctgtaacttcggtgctctttatactgttattttttgtaatctcttttataacttcaggatcaatatttatttcctgtaaatctttttttactgaaataacactatcaatttccggtgaataaacctgcttcgtattatttgctgtgattatcgtcgtcataataaattcctttttaaattaaacagctaatggccctgactgtataatagccttcttacgctgaaaatcgtcttttcctatcttacctaactgctctttcattttatttaaatcctgctgtgattctgaaaaagctgccattattttttccatcaatgccatcaatttatccagcaactcctgatctaaatctatgtcagcatttaatttcattacatctttattaagttctgcctgagtgactgaatttacaccgttaacgacagtagatgtcagcatcattgaaattaataatcttttaacctccaccattacctgtttcaatacttcctttaccgattctgataccacctgaccgataacttttccggcaacagcacctgcagcagcaaacaccgccatcacaacaacaactgcaagtaccatggcaataatttccattttttcttccagtttttttaactcagccggtggcagcccaagtttttggccaattttcatcgccatatctttaataaacttctggacaacttccaccaattttgtcactggtgtcattatcgttgccataatatccgggccaccggtcgccttaacaatttcactaataatagtaacaaccacaatcactgcggccagtgcttttgccagtaaaccaccagtcagagcagttaatataaccattaatgcgatcaataatggccctaaccatttaaaaagggcctgtaaacgctctgctttttttattttctttgccatttcagctccatcagcatcggttttatcctgcaatgttttttgctgagcagtggctataagacgatcattttcaagtttacgctgcgctaacttattccgcagatctgctattttacccatcaaagtagttaatgatttactataattcatatcagatttacgctgagagccgaatatatcagaaatatctttcataatatctttcgcctcatcctgaagagtggccatttcatgtaatgaatttaattcagccgtaatctcctcacgatttcctgtaatgagagaaccgagttcatcatccagcacaggaaatttattcatttcatcagaaaatgatttaaataacttggttttatccttataaaacactgactctgaattgatgtttttaataacttcatcggcatttgttttacttcttaaatataaagaaatttcatctttacttttaaatttatcaacaccattaccggttaacttatttttcagctcaccatccggcatctttcccaactgctcactacccatctgtgagaaataatattcagccgttgcttcaatatggtcattaatcaaatccccggattcagaaataagctctgataattgatttactttattatcagaccataactccttgatgaatttaagattgtacccatgagctcttgaattaattttaaatttctcttcagaataaaaatccgtcagcaatgaatgtaattcattaagtgaaaaaccaccttttttcttacctgtggtatctttactgtctgtgttatccttactttccggggtacttttacttcccgtagtactttcactacctgcagtatctttatttaatgttggcttatccaattttggtttatttaattctgattttttctttccatcattagctgatgttgattttttactaacatcactaaccatcaccttgctaaactctccgacaggatcattaacacgattttgtttattttcacctgaatttttatttacactttcacttgacgttgtggtatttaaaacaccaaaatctgatgctttatcaataattacagtcatacaattccctttttatgtcagaaccttaaaaatccctttaattcctgagccaattcactaatcattgttgtaattgttctcagcatattgtcataattactatttatagtgttataccgctgagtgtattcatctaacgttaactgtaatcctttctttgcaccatctatcttttgatttatactattgatgtcatgttgatatagatgagaccctatttttctttcatcatcatttgtaaaataactataaattccttcttcgtagttatcttttaataccttttttgtatattcaacatcactggaagccgcaattgattgttcatttacacgatcccagtttgatagcactggtggatttccactaaaagttttatcaaaattttcatttatacgatcaagtttatcttcgtaagatgcaaaatccataaaatgataaaactcagtcggaaacagaaattgctctacacgtccttccaatccgataatattaccagcaccatctttcacaggattcagtaacttacacaggcgagttcctttaataacaggctgatgacaagaaaaaaaatactccattttcccatatgcatctttatatgataaattttcttctattactttatcatcaaccagaacgttaaatttatcgtcaccgaccttaactatcttcatactacctgtatataaagtatagccaacagaatctccataataaaaataaggtttcatagtgttgtataattcagtataaaactttcttttatataccttattctgctttccatcattgatggattcaccaatataatcaccaaatgtatttaattttgtcgtcacacttttataaaaatcaacatatttgttcatgccttcacgctgatatttaactgaaatatcataagcatatacactgacattatccatcctctcaacaaaataaccaaaagtaaccatatccctaatgataaaatactcctgaatacctttatttatcaatcttattttctctgaaatattatcaccagcattattaattgcctttatgttttctttattcttcattaatatatcatatgcttcaagttcttttaatgcttgttctcttgtagtgtcaggatccgacagaatataattaatcctatctaattcgctataaatttgttttactttatcttcataaaagtgttcccaaaatctacccgccatagatttaatctgttcttgttcaattctatcaacaatcaccctcgttttattaatcaattccgcacactcttcatgcattatggctttatttttaatattattcttaaagttactgtcatttactatatcgtagtattctcttatatatttcacagcctcatcatacgaaatgttctcagtaaccgtgagcgcatcatatactaccctaagcctcataaaatcattatgcaatgaggaatcataactgagatcatcaactctattatttatttcaaacccattttccaaacgcatcatccaccttccagcattgatatataatgtattgcttgttcccgctcattatcattacacgctaatgaaaggcaatgattgaagctgcttatcgctgattctttctcacctgtgtataaatagcattgtcctgcatacaaatatatcgatgcattgttttcatctaagttaatagctaaaccataaagattaatcgctttctgatattgtttttgtacctgtttaactgcagctaatccaagtaaataatccacattgctaaagtcatataaacagagtgaacgaaaaatattctcagcttgttctataagtcctttatcataataatcacacgccagagaataaacatccgaaaaatcctcattattctttggcatcagaagatcagaaatgtttccactttccagatgagaaaaaatattcccgatcaaagatttaatatcaaaatctgtattgtcatccataacaaaacccccttaataatattggattatcaagtcagacaatactatctgacccggctgataatcactttcataaaatacgcctcagcaccatcctgctgatacatattagtgcggctcactatcggcaagtgcagcctgctctgcgtcattcagccacagtaagagatcgagaaacttatccagatcatcatcaataatggtgtcaaagacatgatatttccggaataacgtccgggccaggcggatatcccggacaaccggcaccctgtgcttttcggcatagcggcgcacagccagcgcatacatgcctttctctttcacggtaatgagcggcataacgccgttttccggatcaagatagatagcaacggcaatatgcgtcgggttaaccaccacgacatccgaattctttatcaatgctttggtttccgcattcagcaattctctgtgttgctgtttacgggctgattttatttcctgattaccttcgctgtttttatactcttgtttaacttcatgcttttccattttcatgtcattaaaaaagaaaaaatattcaacgatgtaatcaatcaccagcagtggcatcagcagcaggataaaaataaagatataacggccggtgaaatagagaaagctctcactcgcttcagagaaaggtgctgttattaactgataaatatcgccggtatacaaacagataaaggtatagccggcagataaatacacaatgagtgatatcagtgcttttaccagatttttcagggactttttggtaaaaatccgtttgaatccggcgatgggatcaattttctttaaatcaaatttaatcgcttccgtcgcaacagcaaaacgggtctgcatcagagaaacaaagctgacactcaatccgcataatataatcagcggtaacaccatctgaaaaaagatatccgataacatctgtatataaacagagagtgacaagtgattcacattacgcaataccgtctgataaaaacgggagaatgctgaccagtcagcaacgtaaagcagatacgctattcccgtcacatagccggttgtggagagcagttctttatatttgaacgtattcccttttttcgattcgtcctttagtttcttactggtgggtttttcggttttttcagccatcgttccccctcaaaaagtgagtcagaggggaagtatcaaacagcactgtcacatccgtcattgttgtgctgcgaaacagcagcagcgccagcagaaaggcaataatactttttattgaaagtgataaggaaaacggattcagttgtgaattgtacagggccagaatgcccaggctgacttcagaaataaataagataatcagtaccggcatacaaaacagcaaagagagtgacaggctgtttgtcagccagtcaaataccgccgcataatggatttccgtcagcaatgtacccggcggtaacaaccggaaactatcctgaacggatgtcatcagtaacacaaaaccgtcattgagcaaaaaaaacgagacagaaaacagattcataaaggtggaaaacggtgatgcatcggtccctgttgtcggatcagcggtatcactgatattcgccccccgttggttatcaatatattcaccgaaggcggaaaaaataaaaaacggcgtgctgtaaaccaaccccattaccatgccggtaatgatctcactcagtatattgaccactgagaactctgccgccgggtagtctccatttccgctgagacactgcgccatgagaaaaataataatgccccgcgtggtccggctgaggataaatttatcattcagaaacggcaaaaaagagaacgccgcaaataaccgcacactacttaacagcgcgttctgaaaaaggtcatgaagccaggagaataacgacaccgggaactaacctgccgctgttgcgctgagcgccagtgagaacatttcacgggcataactgagcatcgaatcccccagccagctgagctgcatcaggatgcagacaaacacagcaatcaatttcagcccgaagggcagtgtctgctcctggatctgcgtgacagtctgcagcaggccgaccgtcagacccacgacggtcgccacactcaccggcagcagcgataacataatcaccagataaattcctttatccgctgcataaatcacatccatgttatatgtccataagttcgagatactgagacaccagactggtggataacagcgaccagccatcaagggcaataaataagatcagtttgatcggtaccgagagtgtgaccgggctcatcatcatcattcccagcgccagcaaaacactggacaccacgagatcaatcacgataaacggcagatagagatagaagctgatcagaaaagcagatttgatttcccccagcgcataggcggccagcaggggaaagaatgcgatatcacgggcatcactcagttccggttcagcatcctcatcaacgtctgtttgcgcaaaaaaatacagcagaggtttatcggcataacggaagagatagtcccggtaatcctgtaacccctcatccgtaaaacgcgacagtgattccggctgagataattccacaggattctcattaacatacgcataggttttactgaccagcggaaacatcaccaccatcgccagaataaacgcaatcgcattgagtaccatatttgacggcacctgctgaactcccagggcgttgcgcaccatcacaaagacaatggaaaattttaggtagcaggttccggccgccagaataaagggcagaacggatgccgcggccagcatcagcatcatcgaaacagcactgtcagtcatcattcacccttatgaaagatatgatgaatttccacggcgtattgttccccgatacgtaccagttccccctgtgcaaaacgctgcccgctgatttccagcgtgatccggtgattatccgccgccggcagcggcagtgtatcgcccggttgcagcgccatcagttccgataacggaaacactctgcggtactgcaggaaatccacctgaaccggaacccggcggctgtcaaaaactgccgtttcctctgtggtaaccggcacttccggaataattccgcgtccggagataaccgtgtcctcctgctcctgtttcagtgtcatctgaaaatagcctcctgctctcagaaatcgctggtgttgtgtaataaaaaggatatcgccttcattgatttgctgaatcacaccggtgaatgtccgggttgaaccgatataaatcccggcattcaccggaacagagagatccggtgtcagcggcgggccattaatatcaaaccggccacgggcgccaatcagagtgaaatcaatatttccctgacggaaagcaagtttacgggttggattaacagcgatgttttccgtccggaactcaggaaaataactctccgctgaaaaaaaaggcagccggacctctttcttattttcatttatcagatcaataagataattttcaggaactatttcccaggggatcgtattttcgccaatcagctcagaaagaaaggattcaacatcaattaaaacctccaatatattttgtgtattaattaaatgacacttgatcgttcgtttggtattttcttttttttccggcagataacagctcagataatccattatctgatgggtatcataatgcatttattttatccgttcatattatatcaatattatcaattccgtttatatttactgctattttcagtcgtcgcttcagggattctgaatatgtttctaatttaaaccctcccggattatctctgtaaatatgaaccggttccggtggctgatatttctgtctgaaatgataagagcaataataatctactctgctgtacgccggagataacgcatttttctccgtatggtaaaccatcagtggtattttttcccgggtaccccttccctgctcataatgccgcaatggctgattttttgcttccgtctttatccccggcggcgaatggttaagaaaaaacggtatttccggtaactcagttgttgcactgcccgccggtatcttctcttctgctgagatatcagcgcctgaataatcttcctcctctgccggaacgttttttggtttatccgctgatagcatgttatgtgagatatcaccggaaggttccgtggcgatattatccctgaatatactgttctttattttattattttccggatataccagtataacatcatgaactttccggtgatgattgtcataattttttatcatccccccgggatataatatatcgccatgataacatttatcatcatacggacagaacagtgaataaatcaccgggatagcactgtcatgtttattttcttttttattttttatcattccggataaaaaatcagtcacccgttgattaacatgaccttccggaaaatcttgctcagcttccgggcaacaacgattaatattcattacagcgtcctgcttatatttaaaaaataaattcattgtttattatattgttcaaatttaataattttctttttcagattatttattgttttattactctcagcaatatcatccgagatttgcgccagctgaagggatgattcatccactctggcacggacatccgggatctgtttacggtagattgcctgtttgcgcctgagttcattcagtgcggtgtaagataacaatccgcggcattcaaactcaaggatctgctgttctaatcctttgattaacaacaatagcttatctatattttcctgttcctgccggtagcgctggtgcagttgtgtcagtgccgcctgtacacagcgctctttcagactgaaatgcgcgatcagttgctgtaattcattgtgtgagctgttcaagtaatctgcctgtttcatccaccgtaacggattccgccggtgactgacacaaaaaatggcacatcggcagagtgagctcaaccgctttgtcactctccgcattcagcccgggtttatattcccctagctccaccagcagtttcagctcattctgtttcgccagcagtgtccggaaacgcccggcggccgccaggtgctgcggtgaaacaatctgtgacatgacacggctgatgctggccgggatatcaatcgccggatagtgattctgcatcgccagtcgccgggagagataaatatgtccgtcgagaatggaacggacttcatcgccaaagccgtccggctcattttcattatcaagcaacacagtatagaacgcggtaatcacgccggttttcgtcgcccccggacgctccagcagtgccggtaactgctcaaataccgatgccggataccccagcctgacaggaacttccccggcactcagcgccacatcccgcaatgctcttccgtaacgggtcagtgaatcaacaaagaggatcacctccttcccctcatcacggtagtattccgccagtgaggtggccaccagcgccgcattacagcggtcaacagccggtttatcggatgtcgagcaaaccaggatacattttgccgcctgcgggctgttgcgcagttcatcaatcagttcggtcacttcccggccgcgttcgccaatcagggctatcacaaaaatatcggcttgcgcatgctcaatcagcatattcatcagtccggttttcccccagccggcaccggcaaaaatccccagccgctggccttttccgcaggtcagcagcgcatcaatggctttcacaccggtcggcaaaatctccgtgatacgctgccgggagagcacgtccggcgcctccccgctgacggggcggatgatactccggttatccggctctgttatctcactcagacgggccagggtattaccggacggatcaatcaccgagcccggaatttgcggtgtgaatgtcagtgttacttcactacccgtcggcgcgatgaccgttgtcagtgtcagtccggcggcctgtccgatcagactcagcagcgtgttgtgttcattaaagcccaccacctgagcccggccgagcagtacacgacaggtaagatcctgccataacagacaaatttccccgataaagacatccggcagcggcgcttccaggtaatacccgcggatatgcaccggaaatgcccgctgactgagcagtgcattcagcataatcagcctctgaggatcagtgtgtgacactgctgactgatgcggacaaactgatccagcgcctgcacaaaaggttccgcgccgctgacagcattgtgactgaaacacccgaccagctccgcgccgttatctgtctgccgcagcgccggtgagcccggataaaacagaggggcgggttcttctgtcaggatatccagcaaaccgccttttacctccggccgcaatgccggtaaatcagtctgcaacggcatccagataaccggatattcatcaaccaccgcaatatgaatgacctgctgttcccccagcgataatgagattgctgaatgattatcgagtgagctgccttccggcaccaaatcgccgcgcccgataagcttcattccttctgtaaccagtgttgcaagatccatcttcagtttccttgttataacattaaacagagtcaatcaccgacacctgcgccgacggaacaatttcagaaaatgacagcacggcaatacccggatagtgcatttcagtcagtttccggacaaaacggcggacatccattgccgtcaggaaaacaatatcccgccggtgccgcagcggcgtcatcaccaatgacatcgcatcataaaaatgatccagctgcgccggttcgagattgataaaagtacctccggcagactggcggatcccctgacggatcatctcctccagcgggtttgacagcaccaccgcccgcaggacctgatcacaggcaaaatgcgctgagatgtaacgggcaagatggctgcggacatgctcaaccaataccagcggatctttttctttctgcccccactgcaccagtgcgccgaggataattttaatattacggacagagatctgctcagcgataagccgctgaaagacatccgcaatacgctgaacggataaatagcggtaacactctttcagcagctccggatatttattctcaatattatccagcaatgttttggtttcctggatgccaagcagttcctgaatattttgtgtcattacccggctgaattcattgaaaaataccataacaccgggttctgttcccatcccggctgcccggcatacctcatcgtgttttttatccgtccagacggttttttccccgccttccggctcaatcacgaccggttcaatattcagtgactcaaaggcatcatttatttctgtcactttgtatttatccggatagctgtaaatcacaccggactgaatctcattaattaagatcaccgctttattttccggtatctcacggctgtaattgataatgatgccgggtaaaaagaaaccgaagcggaaggcaaattcctcctgcaaccatgctgtcatcttctgtttttcaaacaaagactgataacggttgtggagggtgataatcagcggaatggcttcattattttccgccgtcagtccgcgtggtgcaaagtcttccgccggggatgcggacgatgcagccacagcagagcgattgtcagtgccggtttttccggtccctgatttctgcctgttctgtctgagacgcatgccgtaaaacaacatcagcccggcggccagcagaccgaaaacaccggccggaaaccccggcagcatccccatgcatagcgccaggacagcggtgactatcagggtaaagtcatgggaaaacagctccctgacaatattggctcctaaattctgattggtgccgctgacccgggtgacaataaatccggcgctgatggcaatcagcaacgccgggatctgtgccaccagaccatccccgatggtcagcagtgtgtaagtactcagcgcttcactgaacggcatcgacatttgcgcaacaccgataccaattccgccggcaaaattcacgaaaatgatgacaattccggcgattgcatcccctttgataaacttcattgcgccgtcaaacgcaccgtacatctggctctcctgctccagctctttccggcgtttgcgcacctcttcattatcaatcaggccggatttcagatctgcatcaatactcatctgcttgccgggcataccgtcgagggagaaacgtgccgccacttccgccacacgctccgaccctttggtgataacaataaactgcaccacggtgacaatggcgaaaatcacaaacccgaccacaatattttcgccgataacaaattcaccgaaggactgaatgatattcccggcatccgcatccagcaggatcaggcggctggtactgatggacagcgccagccggaacagtgtggtgatcagcaaaagtgccgggaaagaggtaaaccccagaatccgggtgatatagaaagagagcagtaacatcaggatggaaataacgatgttcagcccgatcagaaaatcgaccagcattttcggcagcggaatgatcagcatagcgatcaccatcaccataatcagcagtactgcgatctccggcctgcttttgatcgcattaataaaagttgtcagcatagcaatccattgccggtgaaagttataagatattaatagttttgctcataagggctttcagaaaagaaaccacctgctctttgcctgcttcctgcagaaaaaggacatcctgtatctcaccaaaaatcacaatcaggcgctgtaaaataagcggtctgtttttgtcattttctgccgccgccagcaacgattctgtttctgactgaaatgcctccgggtcacccagcccggaaatcagcaactggttcagtcgtggctcatctgccagtaccggttccgtgcagttcagagaggaaatcttctgatgaaacatatcattcagggaaatcagctgattcagggtatgcagacgggttgtcagttccccgaactcactgtgatggctgcaactgggcagtgctgccgccatatcacacaccagcgagtcacggatataacacagcaggcttctgacccggcttttccggtactgctccagccacactttccacagatacagtatgtcgaatttccagctgatataactgcggtataccattctcagttgcgcacaatccagttgtgttaccggcgcatactggcggattttcagtgcgatattgatccctgcacgggtttcctgtgcaaattctccgtagagtaactgctcaatttccgcatcaatttcggcggcttcctctgcagaaaacggcagtttgcgcaacagggaacgcagtgccatgacataatcactgggatccggaaacaaattgcgcacataatcgagaaactcacgaactgagcgcccggaagcagcaaaccacttaacgacccgatccagttttgtttccgcaccctcagcactgtttttctgctctgatgccggtaactggctgatatgatcctcttttccgtactgccgccggttaaactgcgacagtgccatggccatatcatccatcacatccatcatctgctcggcatggttttccgtctggttttccgccgggcgctgctctgctgcagcattattctgctgtttctgtggtgccgcagacggactgaacaccggtgcgccgggtaaaccatttatcatatcaatagtcctgcttcagtttttgaatcatcttaataccttgtttattctcataattaaacggaatatgaccggtgatttctgtatcgctgaaaaaatcctgctgcagaatacggggctgcaacaaaaaaagccggaccattttttctgtcttcactgattcaaactgaaacaaccgccctgccagcgggatatcgcccagcagcggaattttatcgttatggcgatgggtattttcccgcgtgtaaccgccaatcagcagtgtatttccctgtgcgaccctggctatcgtgctgatattcgtgcggttaatcaccggcagagcatcttcaccgcctgctctgtcagcgtcctttttctgtgcgccgtcttcaagctcaataatcatctccacagatttccgctgattggcgatccgcggtgtcacactcacctttgtgccgtaagtgatgctttccagagatgatattctctcgccctgtaacttgctgtaaaatgtggtgttattatcaaaaatcgccggcgtgttatcctgagtcagaataatcggccgggataccatattggcctgtccctttgcggacaacgccctgatcttgctgaaaaaagaaaaaccggtgaactgattaagctcactgaaattaaaagccactttcatttttcctgtaccgtaatctgcctgccagttgatccccaactggtcagcttcattttttgatacatcaataatccacagtgataactcgatttgcggtttggcagtatccagttgtctgatcagctgattgattaagtgcagtgcattacggttcccttttaacagcaggctgttttccccctgcagcggcacaatccgcacccgctcaccgcccagccagacagtttcagccggctgaatatcgccctgttctgcgtcctgcggtaccagtccggtttttgccgcaggtccggaatccagtaactcgcgcaatgcggacgccactcccgggagtatcaggcttttcccccgtgaggtaatttcccggtcctgcacaaaactatgttccagcttaaccagctgaatatgctcatcttccggcgtaattccctgctcctgcacactgtactgtgcctccagtgcgtccgccgcagaacggatcagtgccagatagcgcgggggagccgttacatacaaaatccgctgctgccggtcagatgtcagcgggtattgcgcatcaaacagcccggtttgtttcagaaaagccgtcagttcattgcgggttaccgcattcagcgtcagcatggaagattcaacttcattgctgctgtaaatatagagtgtgcggttttcccggtatgacaccagcgccatggttttcagcatctgcgacagcgccgcctgcgggtcggataaatcaaaagtgccggagatcttcttctttttcaccgcatcagacgaaataatcatgacatccagctttcctgccagcgcatcaaaaaaatgatccagccgtgtttctttcgccacatactgcgcctgttgcggcggttttttttcgtataacagtgtttgttccgccatgaccggcagagaaaacaggcagaaaaaaaggcagaacaaccccccggtgctattttttaaccgcatgatttaaattccttattttccggggagacataccaaataatattttgatttcatttgagaaaggcgaggccgagcattagccgttatctgccgcgatccgggtcagtgaatgctcttttaccaggatatccagcactgatgccacgccgcgccagtgacgtaactggtatttactctgattgccgatatagcgctggcacaggcgtctgaagtgagtgccggataacccgtaacgctgactgatatccctgatattactatttttgcaatccgctgcgctgatcaggtgtttcaccagccagtaatgctcagagtggcgcagtgtattaaaaaatgtttttattacactattttcattcagtatttcacagacaatccggtattccggattgtctgcatccccctgaaccggaaaaataatctcataatcaggacaaactttgttatccgcaacttcattattatcttcccgggataaatgataatggcaatctataaatgccagtagttttatacatttcgacaacggaaagcagtagtcagcctgactattttccctgcatccattcactttatatatatcattataaatatatatctgactttccttttccatataaattaaaccatccttgtatcagcatagataataactacctgtaaaaccacaaactgttactgaacgaactaaaatttagtgatgaatttaagacattacactatcttttactaccatttttttataaaactaactaccatttgaataccaagaatacactataaaattaaattattatacttatgatttaataaccgggatacactgatgcaaaacctttatactctgataacaatttccgatgaggaatcaaaggaagaaataaccattccatccggaagatactgcatcaacagtacaattaatcatgacgacgacctgattaacctgaatctcacaggtgcagaatcactgcctgaaaaaacagaagcagagttatatgaaaacaactatcacgtctcttttaaaacctgtgatggtgaattagtaatacaagaaatcagttataacgccccctttatttttcagggaaaagtccttttcgccataaaaaaacaacaggataaatggcttaaaaacatcatgttatatgaaaaaacgacaagacgcgctgtcccgcgctatcttctgtctgtaatacttctgttatttatcataccggtaaccggatttattctctttcagtacgatagcaataaaaacggaaatccggctaatatagatagcagaaatattataagtcagtacattaaagacaataattacattattaacggaaatgacattcttattttatcctcagatgaaaaaccaattaatatcatcagaaataaaatgcccggctataaaattcatttaataaataaatcaagactaaaaataaatgatggtgatatcattctgattcatgacctttatcataaaaaagagattacatatatacaccacgatgataaaaaaacactattaaccatcccggatatattcagaaaagacattaccatacaatatttttcattcgatgatataatcaaattaataaataacagattcagccatctgctaatcagatactctgtgaaaaaatcaggtaacaatattatcatttatggcgaaaaaaggagagataaggaaacagacaatattataaaggatatcaacaccacgatattctcagcaccgggaaacacgctggtacagtacagggaaatgccatgccgtgatacaccgccgggagtatatggctcagtaaattatattcacctgtctgatagtcatacacaattcacctctgactaataaataaggatatttatgcctgatatagcaaataaaaatgatgcaataacatttaccaccctgctaaaacaattcaaatcaccgattcatgaagataatgtgaaactgaatacgctgatgaataatttacagtctggcaataaagacacggccaatgcctacgatatggcaatgctgcaggcctgttcctcatcgctgaatataaagtgctcggcactttcagcaatgatccgccagcataaagaaaacctctcaacaccaatcggcaatatgcgctgatttatgacgtaaaaatggcaggttacccgcctgccattaaccataacaaggattgtatgatgtcatcatttaaccggattttacctgtcacaacgatcaccgggatcactgaattactggccgatctcaatgaccgtgagcagtcagctcatcagaatttgacattaccgggaaccgcaaaaaaagacctgcgccggaaaacacaagcactgagcacgggaaaaacagccccggccaccagtgatgtcatgatgatgctggaaaaccaggccgtaatggccaaatggcataccgagatcagtttttattcccgtatgctgcatctgaccctgaatgctgcagataccgtaattaagggtcagtgatgcacaagataatatttatattaataataagcggaataagtctgctgctcggcggctgtaaagaaggtacgattctgtcgtcgctgaatcagcgtcagtcgaatgaagtgctggctgcactgcataaacaccagattcaggcagtaaaagttccgcagggaaaagagctgtttaccatttcagtaccggaagagcagagccgtcaggccattcatattttgcaggaatatcacctgcccagtaatgagcggattgagattgccgggatctttccgtctgattcactgattgcctccccgcagtcagaaaaagcccgcctgatttcggccattgaacaacggctggagcaatcgctgctctcatttgatgcggttaccggagcccgtgttcacctcagttatccgctgtccggcccgggaaactcccggaaaaaaccggaaacaccccgcgcctctgtgctgatctaccattccggtattgaagatgagacacaattcacccgggatattcagacatttgtgatgaatgcctttaacgggctgacggaagataccgtttcggtgcttctgtaccccgggaaaccggttattgaactgccgcctcagccggaagcagccgggctgtccccgctttttctgctgtttccggcaggaataatgctggcagcagccggttatttccgccgcgcacaactacgggcatttctgatgcagcggaaggcaaaacagcatgaatagccggtttgatatacaaggcgcggtcacgcgggtaatgtaccagccggcggattatctgcacagcagccgcttattcagcggattgccgccggcagcacaatcggcgtcttaccgcagaatgcagaacgcagctattatggatcactaccggctgccgcgtgagagggattttgatctgttctccccgctggttatcccgctgatgcgccactggcagcagcttccggccgtcagctgttacctggatatgttcatccgccatgcttatggcctgccggataataccgtgccggatttatcacaacaggcatttttatctctgagccccgtactgccactgccggagtggccacaagcagacaaacagccggatattccggcagtcctgcccggccggattgccatgactcaattattatccggtttttcccccgcgctggcggcccggtttcagctgatgacggatgcgtccttatcaccagcagacatacatctgccgcatctgccctgttctcttttacctctggtattacattatgtgccgttcactgcctgattccctgttgtcacatatcagacacggcgtgctgattaaacatcgtcacgtctctgccctttgccgcctcagtaacctgacccggcaggcaaaccagcacgctgcccgcctgataaaacaggcggaagatactgcagaacaacaccacagagccggatttgatgccggttttcagcagggtctggcacaggcgatgccggaactgatgcgcgtgatgaatgagtacaagtttgtcattcatcagaacctggccagcgcagtttccggtctggaaaaagaactgaccgtattttttgatgataccggcatacgttttcagctgattcaccaactggttgaacagtttgctgcggagtgtgaatgtgaattaatcctgccggctgagcttaaaaaggaaatgactgaatatccggatttcactgtgccggtttcttttcatttcagtcgtaacatcatattacgtatcggaaaaaaattactttatctgacaccggaaacgtttgcccgtgaaaaaataacacaaataaatgcccgtgttgttccggatagcccggcggatatatccggtgaatatttataattatacaaaaaaggacaataaatatgagagcagaaatgacaaccggaaaaccggatattaatcataacgaaggcaatgagaaagccaaacgattgcatgactggcttatgactaattataataaaaaagaagatatttatctaggaatgaggttagtgggtattgatggctataacaccggcaataatatacaagaaaaaataaagttattaattgctgttgaaaataagttaattaaaaatccggaatattctgatacggaaatgtgcaaatcagtaagccaggttggcggcgaagctgtgaactattatgccttttaccaacaatatcttcttaagatggtgaatcaaaaacagctgggattagcaccggatgtactttccgctgattttgaccagaataataacaaagatgactggcttactgcgtttagctgataatgtctgtcgtatcagattgataacaacagaaacaatatcttgatttaaataaattgtttgccgttcagtaatactgtttctgctctgaactgatttgaacgcatctgaatatgtggctcatgcggatgttctgatgcttcagctttaccgctgaggaaccattcgatcggcgcatctaataattcagataattcaataagatgatgcagactaattttactgacaccgcgttcataacggttaaattgctgctgactgatattcagtttttgcgctaatttaaccgtaacaatcccgagttctttacgtcttgattggattctgtggcctaagactgcataaaagtcggaagtttccataatgtctacctattttctctataagtcgtgaattcaattaagtaaaattacttaaaagctatattttttatgtattaaaattttaaataaaaacaaagtatttctcgcgaaatactaaaatttacgaataatttcgttttaattatgacgcaatatttaaatttagtttaatatcgatgtcacacttcacagaaatttcattatatctttaagaaataaacagatttatctgaacttcagtgagaatgcttaacctggtttatctatttaaccaatttaaaaattaagcgccacagaaaaacgtgagaatctttattacgatatcaaaatttaaaatcactctgcgtatttaagactattccctaaacaaaataagaccaggattactaactagtcacataaagataagtaatgtttttggtataattacttagccattttatgattaatttcgttgccttgtctttttttatgctatccgtagcatcagccgaaataatgagagaatgtaaatcaggatgtctgattatatactaatccatccgctaactatgattctttgatctaaccacataaaaagtgaaatagatcacacgtaacaaaatatttttcatcgtttcacatcaatttagtgacaatagtcacactttaaccgccattatgcttaaaataccagctatgtgacgaaaaaaaactcagcaactgatcaatcagtcatccggaggatgagttgattgaaaaaaccagtaacaaataatggtatttataattacccatttacacattacttagtcactttcgtaattataatcatctaattatttttagatagacatcagttatgctgcccggagaaaaaaccattaaaatctgacattcacagtgagtaagtgtttcatgctgcaccgtgaatatttcattttaatttcaagtttttattctcaacaaaaaaagatatccagcatgatattgcagtctcattcttacattttgtaacttacttgttgtatttgtaattttttatttattaattttcacgtcatttttcgcttaaaccaggataacttaaatcgacgcccttatatatcaatgcattagataataattgatttaaaacaattagttgaattaattacaaatccatattgtgacaggtgtcatttacgttttttctataaaccgctttattgattcagtcaccatttaataattaaaaacgtttttgtttagctgcttatatatcattacaatgagattatttaggttatgtcactttattacaggcataaaaaaagcacccgaaggtgctttttttagcgtcagtaaacttaacgaccggctttcagcttctgataatagctttcataaagtacgctggcgtcacccacatcatcctgccactgccctttgcggatggtttcctcatccggatagagtgatttgtcattcacaatctcagccgggagcaattttttcgccgccaggttcggggtcggatacccgatagtctgtgcgacctgtgctgcaatttccggacgcagcaggaaatcaatcagcttatgtgcaccttccgggtttttggcattagcagggatagccagactgtccatccagaagataccgccctcctcaggccagacaacatcaatattcaggccggactgacgcgccacataagcggagccgttccagatcatcccgacattcacctccccttccataaacgggttggccgggttatcggagttaaacgctaaaatattcggacgcagtttttgcagctctttatacgcctgctcaatttcagccgggtcggtggtatttgctgaataacccagtttgctcagggcaatctggaacacttcgcgggcatcatcggtcatcagcaggctgtttttgtactccggtttccacagatcggcccaggaggtcacagatgacggatctatctcgtcaccattaataccgatagcagttgcaccccagatatacgggatagagtaatcattttcaggatcaaacggtttgtgcagcagattcggatccagattatcaaagtgactcagctttgatttatcgatcttctgcagcatcccctcgtgacgcattttggcgacaaaataggttgaaggcaccaccaggtcataagccccgtctttgtaggtcttcagtttggtgtacatgctttcgttggattcataggtggagtaaatcaccttgattccggtctctttggtaaactgctctaataaccccggcggaacatattccgtccagttatagaaatagagtgttttactgtcatctgctgatgctgaactcaagcccgctgccagaataccggcaccaagcagtaaggaccactttttcatttcagtgtttccctcaacccgggttaatcagtgaatatcacaggcggtaacgccccctttattaattaagcagagcaattataaaagcggaaaagcggggggtaaagcaacgattacgtcataaaacggtaacagaattgaaaattctgccgcaatgcgggattattcacaaaataaaccggcggatccgctgaagaccgcgccggtaacagaaaggttactgctgtttgtgtgagcgatcacgcagcacaagctgactgatgatgaccataaacagcgaaagtgccattaaaatcgtggccagcgcattcacttccggtgaaaccccgacttttaccatcgagtagattttcagcggcagaatttcatagctcggcccggtgacaaatgaggacaccaccacgtcatccatcgacagggtaaagctcagcagccagcccgcaatcaccgccggtaacgccagcggcagaataatcttgcgcagaatggtaaattccccggcgcccagatcccgtgccgcttccagcattttcacgtcaaaatctttcagccgcgaatagaccgtgaccaccacaaacggcaggcagaaggtaatgtgcgagaacaacagagaccagaaaccgagcgataccccgaggatcataaacagcaccagcagggagattgccatcacgatatccggtgacatcatcaccacaaacagcataccgccgacaaacggttttcctttgaaacggtagcggtacagtgccaccgctgtcagtgaaccgataaccgtggcaaatgtggcagacagaatcgccatcgtcagtgaatggcccgccgcctgcaacaggctgtcattattgaccagtgtgctgtaccagtcagtcgtgaacccctgccagttgatcccgaaacgggatgagttaaaggagttcacaatcagaatgacaatcgggatgtataaataagcatagatgatggtcataaaaccaccgcgtaacaggcgtcctatcattccagttcacccttcttatttaacatttttgccgcacggtaatagacatacagcagcagccccatcgctgcggtcaggaaaatactggttgccgcaccaaacggccagtcacggatattcaggaactgactttttatcacgttaccaatcagcaggtttttcgccccgcccatcaggtccgccacatagaacagccccatcgccggtaacagtaccagcagacaaccggcgataatacctggcatagtcagcggcagaataatgcggaagaaggtctgacatttatttgcacccagatcccgcgccgcttccagataagatttgtcgagcttttcaatactggagtaaagcggcatcaccataaacggcagcagaatatagataagcccgagcaccactgcctcagaggtgtacatcagcttaaagggtttatcgataagtccggtccataataaaaactcattcatatagccgcgtgtgctgaggaatattttcagcccgtaaatgcggataagcgagtttgtccagaacggaactatcagcaggaataacatcagcggccggtacttctgcggcatccttgcaataaacgccgcaaacggatagccgatcaccaggcagcagaccgtggcaatcaccgccatattgaacgagtgcagcatcacctgtgcatacatcgggtcaaataagcggcggtaattgtcgagggtaaagaccatatcgaccagattcgcgtcattgcgtgtcaggaaactggtgccgatgatcatcagattgggcaggaaaacaaacagcagtaaccaggcgacaatccccgtgatcacgatagtctggaatggtttacgcgtcattttcatcgcccagcaccacctcccagctttcgacccacgtcactgcaatcttctgattcagtgagtgatccacatccggatcatcctcattaaagaactcactgaccatcacccgtttgccgttttccatctccacttcggagtccagcgtcattcctttatagttacgctcgcggacatagccgataagcccggcaatcggctcattatcatggatctcttcaacgcgcagatcctccggacgcagcagcacatgaacccgctgccccggtgtgacatcgagagtggtgtaaatatcacactcgtgcccttcgacatttgcgcggatccgttgttcatcgatccggtgcagaacatccgcatcaaagatatttatctcaccgataaactgcgccacaaataggtttttcggctcttcgtagatttcacgcggtgtgccgtcctgctcgatcctgccgtcacgcatcacaatgatacggtcagacatggtcagcgcctcttcctggtcatgggtgacaaacacaaaggtgatccccagctgacgctgaagggctttcagttcactctgcatctgtttgcgcagcttgtaatcgagcgcggagagggattcatccagcagcagcacttccggtttattcaccaccgcacgggcaatggcaacacgctgctgttgtccgccggaaagatgacccggtttgcgcccggcaaaatcctccagctgcaccattttcagggcttcatccacgcgctgtgtgatttcgttttccggggttttctgcatgcgcagcccgaacgcgacgttttcaaagaccgtcatgtgcggaaacagggcataactctggaaaacagtgtttatatggcgctgttcagcggggatatgggtgatatcctggtcgccgagcataatagtgccttcatccgcatcctcaagcccggcgattaaccgtaaaaccgtggttttaccgcacccggacgggcccagaatggtgacgaactcaccatgattaattgtgaggtcgaaatgcttaattatgttcttgtcatcaaagcttttgctcagccctttcagggtgacaagtggtgtcagagaggttgtctcagtcatttatgctattcactctatcccggaggtcatgcagatagaaccgtaactgaaaaaagactgttaaagcagattggtctacttatggccaatgcccaaaaccagttacgccgtcaaaaaaagaagagggcataataaacacagcgaccttaaaatgaaagctgaaacgtcatcacgccactaattttttgttcatctttattcatacatatcttaacaatcatccccctgattgaatgcattttcaaacaggaatgcgatcttattgtccgtgcacaatatctgccgttttggcgctgtaaactattaaaatagatccatcgttagataaaacctatcacatcgatagcagcaagccattggcttccccgcgtagcttcccgtattgttattttcaacgaaacaggaggaatcatctatgtctttaattaataccccaatcaaacctttcaaaaacatggcattcaaaaacggtgaattcattgaagtcaccgaaaaagacaccgaaggcaaatggagcattttcttcttttatcctgctgacttcacgtttgtctgcccgactgagttaggcgacctggctgaccattacgacgaattccagaaaatgggcgtggacatctactctgtctccactgacacccatttcacccacaaagcatggcacagcagttcagaaaccatcggcaaaatcaaatatgccatgatcggcgacccgaccggcgcactgacccgtaacttcgaaaacatgcgtgaactggaaggtctggctgaccgcggtacattcgttgttgacccgcagggtatcatccaggcgattgaaatcaccgctgaaggtatcggccgtgacgcatctgacctgctgcgtaaagtaaaagcagctcagtatgttgccagccatccgggtgaagtctgccctgcaaaatggaaagaaggtgaagcgactctgtctccgtcactggacctggtcggtaaaatttaagaccccctctccgtcttctttcttatttactgttatcgggtgcattgcacccgattttttaagggaataatcatgctcgataacacaatgaaagcgcagcttaaagcgtatctcgaaaaattaacccgtccggttgaactggtatcaacccttgacgacagtgctaagtccggtgaaatcaggacattattacaggaaatcgctgagttatcgccgaagattactgttcgcgaagataacagcgcgtctgcacgcaagccgtcattcctgattgtaaatccgggacagactcagggtatccgctttgccggttccccgctgggtcatgaattcacctcactggtgttagcactgttacaagtcggcggtcatccgtcgaaagaagcacaggaattactggatcaggtacgtaatctggaaggtgaattccattttgagacttactattcactttcatgtcataactgtccggatgtggtgcaggcactgaacctgatggcggtacttaatccaaatattacacacacagccattgacggcggtctgtttcagaatgagatcaccgaacgcaatatcatgggcgtgccggcagttttcctgaatggtaacgagtttggtcaggggcgtatgacactggcggaaatcgtcaataaagtggacagcaatgccggtaaacgcgcagctgacgccctgaatcaacaggcgccgtatgaagtgctgattgtcggcagcggtcctgccggggcatccgctgccgtgtatgccgcccgtaaagggatccgtaccggacttatcggagagcgtttcggcggccaggtgctggataccgtggatattgaaaactatatctctgtgccgaaaaccgaaggcgcgaaactggcggcggcactgaaagtgcatgtggaagattacaccgcagatgtgattgataaccagagcatcactgcactgatcccggccacggaacaaggcggcctgcatcagttacagaccgcgtccggtgcgactctgaaagcacgcagcgtcattatcagtaccggtgcccgctggcgtaacatgggtgttccgggcgagcaggaataccgtaccaaaggggtgacttactgcccgcactgtgacggcccgctgttcaaagggaaatctgtggcggtgatcggcggcggtaactccggcgcggaagctgctatcgacctggccggtgtggtggaacacgtcaccctgctggaatttgccccggaactgaaagccgatgcggtgttacagcagaaattacgcagcctggcaaacgtggatatcattgtaaatgcacaaaccaccgaagtgctcggcgacggcagcaaagtgaccggcttacagtacaaagatcgcgtatccggtgagcttcacacactgacactggcggggattttcgttcagattggcctgctgccgaatacgcagtggctgaaaggaacactggatctgaacccgatgggtgagattgtggtcgatgcccgtaacgaaaccagcattaaaggggtgttcggtgccggtgactgtaccaccgttccgtacaaacaaattattatcgcggcaggcgaaggggccaaagcatcactcagtgcctttgattacctgatccgtaccagtaccagaaccgctgaatagtccgctgttcagttgttgtacccaaaggcatccgggggcggatgcctttttttattccccggtgaacgccgtcacactctgccggatttgttcccgcagccagcgggttttctgattatgcgcattgcgtttatgccagagcatcagaaacggaatatccagctgccggtaaaacgactcctcaaacggcagcgggcggcactccagatccagctgaaatttcgtcacatagtggcggcagtagcccggcgcacaggtgatcagttcatgccccggatgcgcggccatctgcaatgattgttcaaaagaagaataagagagccggatctgccgcgaataaccgagatcatgcaataaatcatccagcgcccacgggatccggttcgcatattccgtactgatatgcgggtatttgatcagattactgattgtccacgcctcactgagcagcggatgtccgcgccggacaaacgccagcggcctgtctgtgaacagcagatcaaaattaacaatatccgggatcgcgctgatgctctcccgcgacttcgggtaactttcgcgcccgagcagcccgatatccgcctctcccgcaatcacctcactgagtgagttataatcccagtcacggatactgaccgccgactccggatagtgattcaggatcgtgaccgccagatcatgcagcataatcaggttcagcggctcttccatcagcagacggaactgaacccctttcgggttatcgctgtcgcggatctccgccaccgatttggcagtatgcagaaattccggcagtacaccttcgagacgcagcatcagcggtgtcggtattaatccctgcggactgcggataaacagcggatcatcaaaccagctacgcagtttggtcagcgctttactgaccgccgagggggtcactgccagccgggccgcaaccaggctcacgctccgctcttccagcagatactggaggatgataagcagatttaaatcgaggcggtgcagtgatttattcataaagcgcccggcggtttccgctgctgacaggatatcgtttcagtaatatcgcacccgccagcgcggttgtcagcagaataatcagcagcattgccaccgcgccggtttccgcggcggccatcagccggatatagagtgaggcaaaactcagctgagcaatggccagcacagaactggccacaccggcacgttttgcaaacggcgacagcgcctgactcatgataatcccgaacatcagtgaaaagccggcaccgcacaagccaaacacaataatcagtatcagcgtgtattccgcaccggacaaaaatattcccagcagcgcggcattgagcaggaacaagcccagcgcggtatataaaatggcatcactgctgaaggcggcgataattttcggcatggaaaaagagacactcatgctgaccatagcaagcaacgccatcgccgctgaaaactgaccggatgtaaattgcatttgtcccatcagaataatcggcgatacactcacataagtcaggatcacgcccattcccaggcaggaaatcgccagccgtgtcaggaaaaaagcattcagaaaaccttccggctgttcctttccggcaactgccgctgtttccgccgtgtgtttatccggccgggtctctttaataaagcacagacagaaaataatgctcaccagcgcataacccgcagaaaagtaaaacatcacagaccagtgaaaatacaacaggataagaaaaccaatcaccggcgccagtaccggcgcaatgcaggtaattccgttcatcatagagaggatttttgtccgtgccgggccgggaaggacatcacgcagcagggcaaacgtcaccacatagcagaacccggcaccggccccctgggcaaaacgggcgccgaggaaaaacccggtggtgacagcggatccggcagccactgaagccagacaaaaaataacggcaccagccagcaccacaggcctgcgcccgatatgatcagcgcaccatccggcaatcagcatcatggctgccattccggcaagatatacggagaaggctgtatgcagcgcactttccggggcattcagatccgcggcaatctgcggaataccggtcaggtgcaaatcaaccccgagcgggtacatcagtacaatccagaagctgaaaatcacatatttaagcatcacactatccccgtcagaaagtcatctgcgggattgtaactatctgtttttccttaccctactgatgattggtaaaaggccgttttccgttttggaaaaggcagtttcctgtcacgacataacagtgcatacggagaaaaatacttttttatttactcaacaccaaaataccggttatatatatactatgatgcttattatcactcttataacgtgtatataatcatatcctctgcaccaggcattacttatattgcgttacgaaaaatttaataataaaaaacataaccattggtatatttattgccaaaacacccaatgaaaacacgataatattatgtttatttcgtcacactctattcatatacaaacaccacagacatactttaatgtatagccctctctgtttttaaaatcagatacaatatatacccgccagaggagttatcatgcgttttaaaacattaattctgatttcgggattactgaccacattgtccggctgtaccaccccaccacggcaaatgtcctctcagcccgcgaaacctgcggcagtgccggtaaaactgctccctgctccggcacagaattccaccagcgacagttgtattgatgatatgtatctgctgcgtaaaacgaatgccaatgattaccgtgtattatccggaaaatacagtgaagtgatgaatgagtttaattttctgcgggaaaatgaaagcatcatggacaatgatattaaaatttatatgaaaaacagcctgacgataaaactcgggaaggtatgcagtgatatcaaactgagcgcattccgctcaatcaagaaaaaatccagtctgaatgccggttcataaataaaaaaggcttgcagttaatacaagcctttttagtctctgtttattatcagtcaggattctgttcaataatatccaggcaatactcagaaagcagattaagaaatgcaaaatagtttttttcattataatactgaagtgccaaaaaacgttttgcatctgaatcgccttttccggccgcaataagcaaataatactttcccttttcaatatctttgttcacaccgtaacgtccggtgagatacaacgttcccagtaaaaactgagcatttgtctctccctgccctgcttttatactcagcagctcaacattttgcggcggcgtccccgcataacaaagtaacgggataaaaagcagcgctatcaaaatccgggaatatattttcatttttcctttatccgttaacagtgtgccggggtaaagattatttttgatttattgtcttttctttaccggcaacaacgatatcagggtttactttattactcttataaggttcggactggccggtaaaacgcccgccggtaataatagaaaatgcttcagcgcggcacacaccattaagttcgcccttttgtaaaatttccgtatttttagcacagcaggtgcccatcataagaccattgattgaaacatgctccgcagtcacatcaccttcaataacgcctttttccataacagaaactttaaaagccccggcattgatattccctttcactttcccgtatatttcaatattccccccgggagtcatatcgccggttatttcacagccggttcccacaatggtaatacttttaccggctggttcattttttaccggttctgcttttaccggttccgcttttacgggttctgctttatcttttttatcgtcttgtctgaataatgccataaaaaaacgccttcctgttgtgatgaaaaataatacaaagagaagcaaaaaatagatgctcatatgaaaatacaattctctcccggaagagataatcgctatcagcactcctccccagagaaaccagagactgtataaatacaaatgtattttcattcgttcagcgtctttatgcttactggtataccggcacatcactgatacaatttatattgatctggatatgcacaccattctcttcatcgatataaaacacgacgttatcaccgtcatagtgatatttaatatcacaatcctgtttaacaaattttttcattatatttgccaaatcagttttcatatcatcaaaaatcatagttcctcctgatgttcaggtttaaagtgacaacaaatacatctgaacagaactgcataagataaacctatggtttctcatcatagataaccatataactgctggtatttaataagttatttttttgattatttttcagatctttttccaggtcaccaccgaatccggtttgtacatcgtacccgttgttatcgaagaatgcctgccaggcaccggcgatctcatccgagtaaaactgatcaccggattcatcgcgctgcaccggaaccgccggtaatgtactgaacacatcactgtgcgggatcctgctgccgggcggcagttttccggcaggctccggcagtgtggtcagatccatcggaaacggcatgccccgtctgccggataaaaagcggtttctgagatcatccggagacacggcgacaactgcccctataccctctattgtttccgatattaccggctcagattgtctgaccaccggttttgatgcagaggatactgcgactgaaaccggaaaaataaatggtaaggaaaacagcagatataatcttatttttttcatattaaattttttatatgacataaacataaatatgtcccggtcccggattttcagagttaatgatgataaaataatttatcaataagtaccgacgatatccccatcataatggttttattcattatttctgtataaatatactttgttattgtttaaatcattttccgtaatcattatagtacgattgttctattcttccttcatgctctccgaccttatgatggtaatagctccctaataccgagaataaattattaacatcgtttggtgtcatttgaagagcagcaaaatagcgcataagcatgtccaggttaaaacaattcacgcctctttcataacgggagatctgttgctgactgatacttaagatttttgaaagttcaataccggataacccgagctgtcggcgtttatttttaagagcctggcctattacgctggaaataggatgaatatttttaatcacaaatcctcctgacgactacattacactctgactactatttattataaataaaacaatatgcattctgttttatatgccatgtgaaataatgataatcactgaaaagataaactaatatactgcatacctgtttaagacacctccttcctcagttaaaaaagataagcatgataatacattttcactccacgtgagagtaaaaatgctattttcagcattcattttgttaagtagttaactattttattgataacaatatcagagcggcagagattaatgctctctgctatcccgtgtacggataaacattatcgtcactgatatgtcagctgtatttctttttcttatcgccggggaaattggtattacaagacaatcacgaagatcattttgtcgccatttacctgttatcgttaataaccttctttatataagttattttattttcatgtaaagagtaaatgacttatggcggtgtgtgcaaatttttattcacctctccattcaaatcgaacaatagattaaacctatcaataaaaatttattcatacctgaaaaatagcataataagtcaaatttactaattacatcagtaagttaaattgaagtgactgtttttacacaataaatacgatttatcctaaatatcccccccactcctctcgcgattacgtttgaagcactctgttacacattcattatgttttttcacaaaaacaccattgtaacacactaattattaacaaattattgcattggtaactataattatccgtggtattccattccggattagtagtataaaaacgcgtatttcacttattaaatcccgtcacccagtattatcatctgatataaatctgctgctctgaataaatgtatatctgccgggaaaaactatctaaacatctgaaatactatatgctcaccgggattgctcacacctgtttcgctgataccaatgttattcctctgttcacacaaaataaaaagctccggctgtcataccggagcttttccttatattaccgtcgtatcagattatgagatacagatcacgtattatcctgtggtctgaacggcttattttatcattaccaatcttctgcattacatggcagaggagtatgtctgcaacagtctcacactgaccacattattgctgtccacgttaacttcaagtacacgccagaatttagtactcgtacctgacgcattccgcggagattcaacataagtatcaggcgcggttcccgatgccagtgttacacggtcattaatatgtactgatacttttgtatctgtattattgaagtttgaccaggtacaactgaagcattccagagcataggtataggtgcccggcttaaacttctcgatggtaatcgtttcaagacccggagcggatgtgttatccctgtcgagatgtaccccgtcataatctttcttattacggaaaaccaccgttccgtccggcactttaatataggcatccggatccttcggattattttccagccactgaacaataatcttggcatcattattacctatctggatcagaccgtactgataattaaggttgagacctgtgcgaatatcaatgaaatcatcataggttctgaagccatcttttgtaataacaatcgcataccgtcctgccaccagttcaacctcaatcctgccgtcggatggtgtcagcctatcaaccagtttttcacctttattctcggaatagatttcaattctcgctcccggaataacaacggtgcctgttttaccggcatccacaacggtgattgtactcttgaacaactcttcaaaagacacggtcagattcgcattaaccttgttctgtccgtccattttggccgaaacaacaatgtcatacgttggtgtcatcgaactcgtcagtgtggcttccaccgttccgtcaacccccgtcttcggcgcagccgcggtcaatgttgtggttgttggtgcactgccctcccaggtgagcgcaacatcccgtaccgggttatcgttcccgtcaagtaccgtggcaacaaatataaaggtatttgtcccgttggccactttacgggtgacatcccctttcagattgaccgatgcaatgtgcgccgttgcgagatccgctgtaaagctgacggttttgtcagccgcagtctgtgcggtctcaaggtactgagcactgacactgatatcataagccgctttggtggtcgatttcagcgtgataaccgctttaccggtcgcatccgttttactggttgccgctgacaggatgacattactgcctttatcctgtgtccatttcacatccagatccgcctgtgtgatcgggttgttattggcatccaccagttgtgcggtataggtaaagatgttggtgccgtttgccactttctcaatcagatcaccatccagcgttaccttaccgatgtgcgctgatgccaggtcataagtaaagctgaccgtcttattggctgccacttcagcagtcgaagcatactgagccttcacagtgatatctttaaccactttggtcgtcgatttcagcgtgataactgcccggccctcagcatccgttttactggttgtcgctgacagcacaacatccgtacctttatcctgcgtccatttcacatccagattcgcctggcgtatcgggttgccgtgactgtccgttaactgcgcggtataggtaaagttgttcgtaccgtttgccactttctcaaccagatcaccatccagggtcactgtgctgacatgtgctgacgtcaggtcatggataaagctgaccgtcttatcggctgccacaaccggcgtactttcatactgtgcactcaccgtaatggtatcgaccgctgttgtggtggaaaccagggtgatggttgcccggccatcagcatccgttttactggtcgctgctgacaacgcgacattgttacctttgtcctgcgtccatttcaccaccagatccgctttgcgtaccgggttgttgttagcatccaccacctgagcggtgtaggtgaagttgttcgcgccatcggccaccttctgtaccacatcaccagtcagtttcacggtaccgactttggctgacgccaggtcatagataaagctgaccgtcttgtctgccgctacttcggtggtatccagatactgagctttcacggtgatggtatccaccgcttttttggttgatttcagggtgacagtcgcctgaccgttaacatccgttttagtggttgccgc

SEQ ID NO: 69 - DNA, 332 bp, unknown
  Altogen 322075 strain
ccgattttccgcgatattaatctgtcggtcgcccccggcgaaagtgtggcgataacagggccgtccggttcgggaaaaaccacgctgatgaaagtgctgtgcggcctgtttgaaccgtcagacggcaagggattcattgataacattgatatccgccagctcggggtcaataactaccacaaaatgatcgcctgcgtgatgcaggacgacaaactgttttccggctcgatccgcgaaaatatctgcggtttccccgaaaatcccgacgagcagctgatgatcgcctgtgcacaggccagttatattcatgacgtgattatatcgatgccgat

SEQ ID NO: 70 - DNA, 37612 bp, unknown
  Altogen 322075 strain
ggtgaagattttcacgccggacagatcatccactttatcaccgagcttctcgcgcagttcctgacgaaccaactgcataaacgcaggctgcggagtgatcacgccacttttctctttcacacccagcggacgtgcactcaggacatcatacatttcctgatcgatcacaccgccctgggtttgcaggagtttcagcaccacgttacggcgctcaagggcatttttcgggttacgccacgggttatagaccgacgcgccttttaccatccccaccagcagtgccacctggtcgaggctcagctcatccaccggacggccgaagtagtagaggctccccagcgggaagccgcggatttgctcatccccgctctgccccagatacacttcgttgagatacagttccagaatacggtctttgtcgtagcggtaatccataatgagcgccatataggcttcattggctttacgcaccagtgtccgttcattagataagaacaggtttttcaccagctgctgtgtcagggtactgccgccctgaaccgcacgtcccgccgtcaggtttgccagaagggcacgcccgatggaggtgatgctgataccgtcatgctcatagaaattgcggtcttcggtcaccagcagggctttgaccagctcatccgggaagccgctgcgggccaggaacaggcgctgctcaccatttgcggattgcagcatagtgatcagtttcggatcgaggcggaagaaaccgaattcacggccgttatccacgttttcaattttttccagtccgctgctgccgaaagtcagacgggcgttaatctgcccttctttactgtccgggaaatcaaacgggcggcgcagcatctgaatagtattaccggtcacagaaaattcaccggcgcgggtgattttggtgacttttcggtactgcataccttcaagcagtttcaccatctcattcaggctgtaatccatgcccggctcaaggtttacagtgcgtccgtaaaccgccgcaggcagatcccagactttaccgtccaggcggtcactgatttttccggccagataaacaccgtaaatccccagcaggatagccatcacaatgccgagtttgaccaggaaccagaaccagcgccagcgccgtttgggcggcttgtttttgcgcccttttttactcatgcgcggactatcctcttcatcgtcataatcatcatcatccggttcgtcatcaccgaattcatcatcgtattcaatatcatcgtcataatcctcatcccggcggcgacggcggtctgagcgccctctttttttaccggcagaagccttgctgcccctgcggccggtgggttcacgatcaaaatcagacatggtctctcccgtcagtctgtctgccgcacaataatgtgccgggcgggacaggcggttatttcatcagttgctattgtcgccgattccggcaacagacacagtaaaaatccgttaaacaaagactatctttgcatttacataaacttttttacacgctttgtcggctgtgcatttgccggatcgtccggccagaaatgtttgggatagcgccctttcatctctttctgcacctcccggtagctcccgccccagaaggctttcaggtcggcagtcacctgtatcgggcggtgtgcgggcgataacaggctgaccgtcaccggcagccgtccctgcgccaccaccggcgtttcacgcacaccatacatctcctgaatgcggactgccatcaccggcggtttatccgccgcatattctacagggatccgggtgccggtgggtacttcaaaatgacgcgggaattgtgtatcaagccattgctgctgcgaccagtccatgcgctgacgcagcgcgccgtataaatccagctttgccagttgctgctgattgcgcacaccggtcagatacggcgacagccaggattccagcccggagagcagtgtatcattatccgccgccggcagcggctgttccggaaacaactcgtttgccagttgctggcggataagtaactgctcacaggcctcattgaatggcagaacagacaaaccctgttcgcggatccagctgagcagcgcgtcgcggacaacctcatcagacggcgccgccagtggtttccgctcaataatcagttgcccgcaggtgaccgcctgccacgcctgccagctgcctttgttttcatcacgggtcaggcggttttcggttttcagcagatgcggcgctatttctgtcagttgtgataactcaaatggcaccgctttcaggatccgcgcattggcctgctgatcattttgcaggatcagcggggcgataagcccggattcattgccgagcggactgctttcatccgtaaccgcaccggtgccgtttgccagcagaaacgcaccggagcgcccgcggttaccggcgattctgtccggaaagccctgtaataaggtgcggcacagccagccactgtccggatcatgagacggttttctgaccggcagaccggcggcctgcaacagctggtgcgcccgcttatcccaccgggcggacggatgtgtcagatcatgcagcagattgccgttaccctcgcgggaaggctcttccagcgcggcaatcagccgggcggcatagaatatatgtgccggttcctcattaagggtataaagccacaacgcagagaggcgcggctctgtcccggaggcggccattgcctcacctttggcggtcagtccgccgtcaggcaaaagacaacccatttctgtcagtagttttttcgccacctgtaccgccacagcaggcggggtatcaagccaggcaagctgtgagacctcacggcagccccactgcgccaggttcagcaccagcccggcgagatcactgtgacagatttcaggctcactgtgagccgcagcgcgttcggcttccgcctgtccgcacagatgcagacagatccccggcgccagacgtccggctcgaccggcacgctgtgtcatcgatgagcggctgatgcggctgcgcaccaggcgggttagtccgctgcgcggatcaaactgcgcggttttctccagacagctgtccaccaccagcgtcaccccttcaatcgtcagactggtttcggcaatattggtcgccagcacgattttacgcataccgggcggcggcggttcaatcgcctgttgctgttccttcagggaaagtgcgccgtacagcgggcagataagggtatccgcatccgttttaccggtcagttgctcctgtaaccggcagatttccgcctgtcccggcagaaacaccagcacagagccatcctcctgctgatacagctgcaacaccgccctggccacttcactgataaaaggctgatgcgcactgagcggctgataccgtctctccaccgggaaagcccgtccctccgctgtgatcacctccgcctgcggcagcagggacagcagctgttcattatctaaggtcgcggacatcaccagcagacgcaaatcatcacgcaatgaggactgcacatccagcagcagtgcaagggcaagatcggcctgtaaattccgttcgtggaattcatccagaataatgatacttacttcggataattccggatcctgctgtaacattctgaccagaattccctctgtaacaacctcaaaccgggtggctgcactgatcctggtttcaccgcgcatccggtaacccacggtttcccccggacgctccccgagctgcgatgccagccggtgcgccacgctgcgggccgcgatacggcggggctccagcatgataatccgtccggtgacagaaacgtctttcagcatcagcaacggcagaatggtggatttcccgctgccggtcggagcctgtaacaacacctgcgggccacttttcagtgccgtactgagtgccggataaatgttacaaacgggggaatatgtcacaaaaacctcatcattatctgcttaactttcgacgcgcaacattgtagcattgccgccccctgaaaagtgcagtcacattgacaggagttacgatggaatttcatcccccgttacaggcgggcacgctggtgcagcgttacaaacgttttctggcggatattatcacgcaggacgggcgcaccatcaccattcattgtgccaataccggtgcgatgacaggctgtgccacgccgggtgataccgtctggtattctgaatccgacaatgcaaagcgcaagtatccgcacagctgggaactgacacagacacaggccggacatctgatttgtgtgaatacaatgcaggcgaaccgggtggtggcagaggcgattgcgcagaaccggatcccggaacttgccgggtatcagacgctggcacaggaagtaagatacggcagtgaaaacagccgggttgattttttactgaccgatccgcagaaaaagccctgctatgttgaggtgaaatccgtcacgctgctggaaaacggacacggttattttcccgacaccgtaactttacgtggacaaaaacacttacgtgagttacaagcaattgctgaagcgggaaatcgtgctgttctgttttttgctgtactgcattcagggattgaggccgtatcggacgcagcacacattgataaaaaatattcatcacttttgcagcaggcatcacagtccggaactgaagtaatttgttacagaatgcggatgacaccggacggcatcactgccggagaaaagataccctttgcattcatggggtgaatatcaatttttttaataataaataggatgttttgtgagttgcggggtgaataaacacgctgttcttcacaccttacaaaactaatgaaagcaagggttgcattatccataatcatctgctatctatagcggcctatttttcccctctaagggatattgtcagacatgcgtgtgtaggagaagcattatgcaagaagggcaaaaacgtaaaacctcgtccctgagcattcttgccattgccggcgtggagccgtatcacgagaaggcaggcgaagaatacatgaacgaagcccagttggcccatttcaagctgatacttgaagcatggcgcaaccaactcagggatgaagtaaaccgcactgtcacgcacatgcaggatgaagcagctaacttcccggacccggttgaccgtgccgctcaggaagaagaattcagcctggaactgcgcaaccgtgaccgcgaacgcaaactgatcaaaaagatcgaaaaaaccctcaaaaaggttgaggacgacgattttggtttttgtgagtcctgcggggttgaaatcggtatccgccgtttagaggcgcgtccgaccgcagatttatgtatcgactgtaagacgctggctgaaatccgcgaaaagcagatggcgggctgacagatttaccacagacggcgctttgacagcgccgtccgtttttatgccactacagatgacgggatattctgccggctcagcgcccggttataccggccgcttcgcaccatcaccttccggtgctcttcatttcggctctctggtgaccgcactggggagttatcttcaggcccgtcacctcggcggacgctggcttctccgtattgatgatatcgacccgccccgcgaagtcccgggtgctgcggatgccattctgcgtattcttgaccattacggcctgcactgggacggcggtgtgctgtatcagtcgcgccgccatgatgcttaccgtgaagtgattgaacagctgaaagccaccgggctgtgttattactgcacctgcacacggcatgatgtccatgacagcggcggccattaccccggcacctgccgtcagcgcggactgccgccggataacgccgcactgcggcttatcaggacgcatccggtgtaccattttaccgatggcctgcggggtgatgtgtttacggataacgccacggcagaggaagatatcattatcttccgcaaagataagctgtttgcctataacctggtggtggtgctcgatgatgattatcagggcgtgacagaagtggtcagaggtgcggatttactgtatcccacctcacatcagctctcattataccgccagctcgggctgccggagccgcattatctgcatttgccgttgatgctgggctcggcggcgcgtaaactctccaagcaaaatcatgccactccggtgccgctcagtgatccgcgcccgctgttatggcaggcgttgcaggtactccggcagccgctgccggaaacggatccgctatcgctttccctgactgaactgctggcatacagtgtgcggaactgggatattacggccgtaccacgtgatgatgtggtgacagacagggaataattccgcaatatccgggctaaggcattctcaaaaaaccaagtgtacgatattattagtcgcttattttttagatcatttaattgttatacagaggtgtaccattttaaaccgagtcgcaaagttctgtcgcagtctgatttcccgcgagaataaggcagattgcacagaggctgccagtgaaaggccggccccgaatgctgaccatacgccgcagaatccgtcaccccgtgaggcttcccccgcgcgtcctgccgctaaacgcaaaaaaccggcaaaaaatatggataacagcgggacagtcagcgcaacggtaattccccgcaatagtcactctatttcccgtcaggacatcagcgagaatgcgctgaaggttctgtaccgcctgaataaatcaggttttgacgcctatctggtcggcggcggtgtccgtgatctgctgctggagcgcaaacccaaagatttcgatatcgcgaccaatgccacgccggacgaagtgagaaaactgttccgcaactgccgtctggtcggccgccgtttccgtctggctcacattatgttcggcccggatattatcgaagtcgcgaccttccgtggtccgcatgacaataacgaaccggctgatgacggcaaagcccgctctcagcagggcaaaaacggcatgctgctgcgcgataatattttcggcaccattgaagaagatgctgtccgccgcgatttcaccattaacagcctctattacagcgtggctgattttaccgtccgtgattatgtcggcggactggcggatttacagcagcgcattatccgtctgatcggcgatccggaaacccgttaccgcgaagacccggtgcgtatgctgcgcgccatccgttttgccgcaaaactggatatgaccatcgagccggagaccgccgcgcctatccgcacgctgagcacactgctgcgtgatatcccgcctgcgcgtctgtttgaggaagttctcaagttattacaggccggtgacggacaccgtacctttgaattattacgtgaatacgatctgctggatatgctgttcccgctggttgccgggccgctgaaagagaacccggacaccccgctgtcccgtatcgtggatcaggtactgaaaaatactgactaccgtattcataacgatcagcgcgtcaatccggccttcctgtttgccgtaatgctgtggtatccgctgtgcgaacatgcggaaaaactgacccaggagagcgggctggcctattacgaagccttcgcgatcgccattaatgacatcctggatgaacagtgccgcgcgattgctattccgaaacgcctgaccaccaccatgcgtgatatctggcagttacagttacgtctgccgcgccgtcagggcaaacgcgcgatccgtctgatggaaaatcagaaattccgcgccgcctttgatctgctcgaactgcgtgcgaatgtggaaggccgccatgagttacaggaactggctcactggtgggcggatttccagcaggcgaatgccccgcagcagcgctcgatggtgactgaactgggcagtgatccggtcaaacgccgtccgcgccctcgccgccgtcatccgcgtgcccgtcagggtaacggaaacagcgaatcatgattccggtctatattgcgatcggcagtaatcttgccgatccgctggatcaggtcaaccgggcgattgccgcgctggatgctgtcccgcaaagccgcctggtgcgccactccgctttttaccgcaccgcgccgatgggtcccgccggacagcctgattatctcaatgcggctgttctgctggaaactgacctgacaccgcaccagctgctcgacgccacccaggctatcgaactggcgcacggccgtgtccgcaaggatgagcgctggggtccccgcacgttagacttagatatcatgctgtttggtgatatggtcatcagtgatgcgcggctgaccgtaccgcattacggcctgaaagtgcgtgaatttatgctgtacccgctggccgaaatcgcccccgggctgattctgccggacggcgaacctcttgcggcggttgttgcccgcaccccggaaaacgggcttggcctctggtcatcatcagagccggtacgctgaactttctgctcaacagacagacaaggagacactgatgcggattattgaaactgcgctgatcctgcgcaaagagattgcccgtctgcggactgacggcaaacgtgttgcgtttatcccgacaatgggaaacctgcatgacggccacctggcactgataaaagaagcccgtaaccaggcggatgttgtcgtggtgtctgtctttgtgaacccgctccagttcccccgcgaagatgatttgcagcgctacccgcgcacactccaggcagactgcgaaaaactgagcaaagcgcaggtggatctggtgtatgccccggcggtcagtgatgtctatccgcacggattggctcaccagactcaggtgatggtaccgccgctgctcagtcagtgtgatgagccgcatcagcgtacccgtctgcgcggtatcgccaccgtgatgtgcaagctgttcaatctggtgcagccggatatcgttttcttcggcaccaatgaccatccgcgtttcctgacgatccgccgtctgatccgtgacctgaattatgatatcgcactggctaccattccgactgtccgggaaaaaaccgggctggcactcagctcctgcaataccctgctgaataaagaggaaaaagaggcggcaccgcgtctgtatcaggttatgcagaccctcgcggatatgatccgtgaacgcccgagtgccattgccgaaagtctggataatgcccgtgatgatttaagccgtgccggattccgcgatatcagcctggaaatctgtgatgctgatgacctggaagctgtgcgcgtcaacagtgagaaagcggtgattctggcctccgcctggctgggaaatatccgtctgatcgactgcctgcatgttaatatgccgaacccggcggtcagtgagacggcctctccgtcacagtaaaatagttctcaatctgcctgaaaagcccggtttccggcgtgctgctgtaatgacgcagccggaaccaggccagaagcccgtcatagcgggcttttgtcagttcctgctccgcctgataatactgatcccgggcatgtgccacctccggctgactgttctgccccgccgcataccctttttccaccgctgttacctgtaaccgcgcagccgcagcggcctgctccagtgccgccagctgtatgccgctgtggcggaacgcctgatactgacgcgccaggtcacgccggagtgtctgtaccagagcatcctgctcatactgcgcctgctgaatctgagcagacactttcctcatccccgccagatcttttccgccgctgaacagcggaactgaaagatggatcccggcactgagattacggtaacgctgaccgacagtatcattgctgtccgatcgggtatctgaccaggcagcaaagagctgtgccgacggcataaacgccccgcgctgtacctctgccgccgcttttgccagcgcggtttcctgttgtgccgctttgatttccggatgcaccgccagcatctgttgttcctgagccgcataatcaccgtcattcagttgcggcagccggaaattccccactttcagtgccggaagatcctgcatcctcagctgctgcaggccggtaagatcagacaatatcagcagcgcattcagactttccgcttctgtttctgcgatctgtgcctgacgctgccgcagacgggtacgggcggattcaacctctgtcacagtgccctccccgagctgcagaaggcgctgtgcagcggtcagctgagcggtattcagcaccagccggagctggtctgttttctgtatttccagagtacaggccaggttcagatacgcagaaaccagccggttgataagctctgcctgctgtatctgtaagcggctctctgtagcagtaccgcgtatctgtgcgctccggaactgatgatatgccgtgtaatcaaacagcggctgcgtcaccaccagattaagggaatggctgctgtaatgccgctgagaggtcaccggtgcccgctgtgtccgccggttatacggcgtgttctgataactcagcccggcggacggctgcaggtgtgatttcccggcggcagcctctgcctgttccgcctcataagccttacccgcagcacggaatgacagatcattgttcagcgcggactgaccgagttcagacaaggtcaccgcctgcacaccggcggacaacagacacaacagtgctgcaaaaaggcgttttgcagaatgcatagggatcactcctcggtcagcgcgaaaaagagccggtcagtcacaggcttaaacagataactgagcagagaccgttcaccggtacgaataaaaatctcagcgggcataccgggtttgatctcctgagccgccgtttccggcacagtgatctgaatctgatagtaaggttccccgtttaccggatttatcagacgatcggcggagatcatcgtcagttcgccgcgcagtttgggagtcaggttctgattgaaggcggtaaacagcagatccgcagactgaccgggggcaactttatctatccacagcggtgataatttgccttcaataatcagcgtctgctgttccggcaccaccgacatcagtttttccccggctctcaccacaccgcctgcggtaaacacggacacatccataacggtgccggtcaccggcgcggtgataacatgctgttccagccgatcgttttcaataacctgttgttttttcagttcactgcgctgaactgacagacgtgataactcctcgcggatcccgctgtgaaaagccgcctgcttctgtgttatctgctctctctgtgtggatttttcttcctccgcacggcttatctgcagccgggcgtcaccagcctgattgcgcagtgccgcactttcccgccggatctcctgatagcggtggcgcggcaaatacccctcatccgccagcgatttcaggtttgccgcctgtgccgtcagactgtccgcctgttgcgcagtgctgcgggcaatctcccgcagagtgataagccgctgcgtcaggccgtcaaccgtgacccggcgggcctgaatctcactctccagttcaagccgccggtctgtgagcagtgcattctgcgcctgtaactgtgcccggccatacgcgggcggcgcataaaagacatcatccgccgccggggtaaatgccgcttcaccacgcagctctgcctccagccgccgctgtatcagcaatgtgctgtcgagctgctctgccagcgatactgcctgagcctgagactgcaccgggcgcaaccgtaccagtacctgatctttttccgcccgctggccgttctgcacataaatctctgaaatcacgccgtccgccggagactgtacctgcttgatattaccggcgatgacaaccgttcctgatgcggcaaccccctgatccagcggggcgaatcctgcccacagcagaaaaccggcaaggccgaaaacaaccacatatttccccgcccgctgatacccgccggtatcggtttttacccccggcgccccggacaaccatttagtgttcattatttttacccgcctgattattaagcgtttcaatgaccttctccgccgggccaaaaagctgcatccggccgccggcgagcagcagcagtttgtctgtcacggacagcagcggtttatggtgagtaataagaacgatggtttttccctgttttttcagggtatttatggcagatatcaatgcactgagccctgcatcatccagcaccgtattgggttcatccaggatgatcagagccggtgagccgtacagcgccctcgccagggcgatccgctgccgctgaccgccggaaaggccggtgccgtctgccccggtcagggtttcatagccctgcggcagttgcagaatgagctcatgcacctgtgccagctgtgcggcgcggataatattttccggatccgcatcagaatcgaaacgggcgatattagcagcgattgtgccgggaaaaagcgcgatttcctggggaagataaccgatatatttgccggacaccgctttgtcctgctgacagagagctgccccgtccagccggacagccccccgtgttgcaggccacaatccggcgagcagcttcgccagcgccgactttccggcaccggacgggccgatgatccccagcacctctcccggcgcgaggctgaaatgcagattgtgcaacagaggcgtatcacagccgggataacccgcctgcatcactgaaaccgacagatgcccctgcggaaccggcaaagccagcttctgcggtagttgcgggtgagccgtcagcaacgcagtaagccgctgatacgccagcctgctctctttggcgcttttccacacaccggtgacctgctcaaccggcgacagcgcacgtcccagcagaatcgacccggcaatcatcatgcccggcgagatggtgttatccagcgccagccagccgcccagccccagcatcagagattgcaggatcagacggacggttttggtgatagtcatgatttttgctgaataatcactggcttgcgtctgttccttcaggctgtcgcagtgccggttcagccagcgctgacgcagattttgctgcattcccatcgcttcggcgggttcagtatgggcaaaatggctgccctgcatgccctgtgcggcggaggaactgcggtttgcggcggtcagcggcggcccggaaagccgttcattgagcagcgcaagcacgatcagcacgacagccccgccactggcaaacaacccgagccacggattaaacagggcaatcaccagcagataaagcgggaaccagggcagatcgagaaaagcaaaaataccgttgccggtgataaaacggcgcaggatcatcagatcggtctgtgcctgtaacggcagctggcccggcgtgcggtgcagctttgcctggaacgcagcatcataaacccggctgttcagtgccagatcgaactggttactcatgcggatcaccagcatattgcgcagatagtcgagaccaccggtcagcgccagtaatccggccattatcagcgtcagcatcagcagcgtcatttcattgccggagggcagaacgcgatcgtacacctgcaacatatacacagacggcaccagcatcagcagattaatcagcgcactgaataatgccagtgaggtaaacagggacttgcgggcggcaataaatgccgtaatgtcatttctggttttcccggaaagcatacacagggactccgcccggcatgtctgccgggattgataatattgatcaccaggtaaaaaagagaggtaattactctttcagaagacaggcaccattttcatgccagatttccgcccggtaacggccgggggcttctgcggaaaagaaataacgagtggtgccgtctgcggtaagaaacgcaataccgtccggcgccggacgccaggccgttatctgcggctgtgccgtgaaatgcagctgaaacccgtctgccgcgctgtcgggaaccgccgtgagtccgaccggcagcgtctgcccgtcctccgtaaactgccagaggccctgaaggtcttctgcagcgggaattttctggctgatggccgcactctgccctgagagcagcaacgaaaacaataatgaccgggaaatttgcatagtgaattcctgaatgctgcggacgccgcacaggccgcgcccgcctgttgcgttaaacgataaagtcagtgtgaacattcaccataccggtgatatccactttaaaatcaggctggtactgatttccgctgacattaatcagcaactctgtcaggttcagtccgtcatcatagcggagcatcgcttccccggccgcaccggtaaattcatcggtgaaataaatgaatttttctccggcgctgttctgattcagtccctgtaaatcaatactgtccagaccggtcgcaaaatcacggatatgatcaggccggtcatacagcgaatccgtcactgccgagaacacaaagatatcgctccccgtgccgccccagagctgatcctgcccggcaccaccgtacagcacatcatccccggcgttgcccatcagaatattgtccgcatcattgccgatgatcacatcatttccgcgcccgccgaaggcattttcaatcaccacaccgtgtgcaattgacacatttccgctcaggccgccgacatccgaaaaatccccttcgtgcagggaaattttctgatcctgcttataacgggagaaattcagggtgtcattgccaccgccgtcccagacggtgaaaataagcttgtctgtaatactctttgcggtgtaataatcgcgcccggtattggaaccaaacccataaacagtgtcatcagtgcggatgttataatttgcaccgtacagtttctgaatcgccgtaatgtcatccagcagcggtgcggaagcgtagtagcctttgtggtccgcaccggtgattttttcactccagtaactcattacactgtactgccgggtatcttcggcgtaatccgcatctttataagaaggacgtccctgaccggcgttatagttgcccggatggttcagcccgagggtatgaccgatttcatgggtaaatgtcaggcggccatagtttccggtcaccggtgtcacattcagcgccccgggttctgagctgtaccaggactggccggagacatcaaaaccccgcgaatcagtcaccgcatcgccaaaataatctttggtgtgcggcagccaggcataggcctgtgtgtatttatcattgatataaccgaaggtgatattggtatagatttccccccggccggcatccacttccttaaaggtaatatttgccacatcagcccatgactgcagtgataaacgggcctgatctttctgatagtcattaaagcccttcaggccggtgtttcctgcgccgttataatacatcccctcccatgtcgggaatgaataggtcacttccgccggttgcccgagcacacccgcgccattccagccggtattggatctggcaatgtaatctccggcctcaaaggcatcatatgagattttattattaatccagcgtccgttaccccgacccggactgtttaacacatcatcgataaacgaccatccgtcttccctgccgtatgcagcgatacccataaaaatatctccgaatgtaataatgaaacagtgtgaaatttatccttaaatatcagtacacagccggtttttaccggcctgcacacgataaacacattaatttaattaatctatattgcagaggataaacgcatactaattctgtgatttaactttggcaggcgcaggaacgggagaaggtctgtattaatcggggataaaccgaggaaaaataattacatagcgcaggaaaataatcaggacagatacaaaaagcccggcaacgatgtgccgggcggattatcagaaagcaggatcaggttctcaggccgcgccctttctcaatcaggcgccaggtgagtatatagaatacggcaataaacaggctcagtaccccgagagtggtggtcagggagacatcactgatcccgaggaaaccataacggaagccgctgatcatatagacaatcgggttcagtttcgacaccgcctgccagaacgccggtaacagcgtcagggagtaaaataccccgcccaggtaggtcagcggcgtcaggacgaacgtcgggataatactgatatcatcaaaacttttcgcaaacagcgcgttaagcagccctgccagcgagaacagaatcgaggtcatcagcagcgtggcaatgatcataaaccaggagtggatctgtaacggcacaaagaacagagatactaatgtgaccaggatcccgaccagcacaccgcgcgccacaccaccgccgacaaacccggcgataataacatgggtcggcaccggtgccaccagcagttcctcaatgcttttctggaattttgccccgaaaaaagaagaagatacgttggcataggagtttgtaatcactgacatcataatcaggccgggcacgataaactgcatgtaaccgacaccgcccatttcaccgatccggttaccgataagattaccgaaaataataaaatagagtgacatggtgatcaccggcgggatcagcgtctggatccaaatccgcataaaacgggtgatttctttgcgccagattgttttcagcgccacccagtacagcgacatcattttgcagcctccaaatcatgattcaccagatgcacaaataactcctccagccggttcgctttgttgcgcatgcttaacacatcaatgccctgcgcattcaactgggcaaaaacaccgttcagcccctgttcacggcggacatccacctccagcgttgaggtgtcggtcagccggaatgtatacccctcaagttgcggcagcgggtttttcgagcccagatcgaggataaaggtttccgattccagcttaccgagcagttctttcatactggtattttccaccagttcaccgtgctggataatcccgatattgcggcacagcatttccgcttcctcgagatagtgcgtggtgagaatgatcgtggtgccctgcgcattcagggttttgaggaatccccacatggagcggcgcagctcgatatccaccccggcggtcggttcgtcgaggatcagcagtttcggctgatgcatcagtgcgcgggcaatcatcaggcggcgcttcatcccgccggacagacgcatcgcgcgctcatcacgtttctcccacaaatccagctgcgtcagataggttttcgcccgctcctgcgccagtttgtgcggcaccccgtaatagcccgcctgctgtaagacaatctgtaatacagtctcgaacgggttgaagttaaactcctgcggtaccaggccgagctgacgtttggccaggaccaggtcggtatcgatgtcataaccgaacacggagactttgccgccggttttattcaccagcgaactgatgatcccgatggtggtagattttcccgcgccgttcggacccagcagggcgtagaaatcgccggcactgactttcaggtcaattccccgtaaagcctgcacgcctcccgcatactgcttggttaattgtgatatttccagtgcataggtcataacagaaaaatacctttttaatttagaaatttgggtgcaatataaaccgaaataatacctgcgaaccggaatcggttcttgacaatttgtcttctttgctgaaattatttaataacaatttattaaaatttaaattttttatacaaaagattctagctaaaggatctgcaacaggctatccgtcatgatgaaaaaaatcgaagagctgtttgccaataacaaacagtggtccgaatctgtaaacgaaaaagatccggaatttttcaaagagttagcacaggctcaaaagccgcgttttctctggatcggctgctccgacagccgtgttcccgctgaaaaactgatcgaagcagcaccgggcgatctgtttgttcaccgtaatgtggcaaaccttgtcatccataccgacctgaactgcctgtccgtcatccagtatgccgtggatgtgctccaggttgaacatattatcgtctgcggtcactacaactgcggtggtattcaggccgcgattgagggcaccgagctggggcttatcaacaactggttactgcatatccgggatatctggtatcagcacagctccctgctgggcgaactcgcaccacaggaccgcatcaaccgtctgtgtgaactgaacgtggtggagcaggtgtataacctgggtcactccaccattatgcaggcagcgtggaaacgcggccagcgtgtgatgatccacggctggatctacgggattaacaacggcctgctgcatgatctggatatcagctctgacagccgcgagaaaatggaactggcttaccgccaggccgtggccaaactctcgaatatgccgtcgtcctgatcacgacagaaacaagccccggataccggggctttatttttgctcatctgaacaaaggcacgacagtaattgttcccggatccgttccgcccgcagttccgcctcataaattgcgttcacttccgggtcggataaaatgttttcgcgggcctctgcccacggaattgattttttactcatcgttcagcctctcctctgaccgccgcgctgcggcagttaatacagatgaagggagtttcacagattttcagtgataaaaaaagcaccctcaggtgcttttccgctgtcacatccggacagattactcttccagcagtgtcacatggccgatatacggcaggtggcggtagctctgggcgtagtcgatgccgtaaccgaccacaaatttgtcttcgattgcgtagccgacccagtcaaccggcacatccacttcacggcgggacggcttatccagcagggtgcagatagccacagagttcgggccgcgcagagacagaatgtcgcgcacgcggtgcagtgtattgccggaatcaatgatatcttccacgatcagcacgtctttgccgcggatatcttcgtccaggtctttgacaattttcacatcacgggtggacgaggtgccgctgccgtaactggataccgtcataaaatcgacttcatgcggaacatcaattttacggcacaggtcggccataaaaataaaagatcctttcagtaacccgactaagaccagctctttgttgctgtgacgatagtgtgcggaaatttcgctgccgagatcggcaacgcgctgctgaatctcagcttcggagatcattgtatctaaggtgtgtttcttcatgatttttttgtcgtcaacggtacgctgtttcagtggttcggcattaaacccggtttaataccggtcagaaagcgcgttagtttagcataccacggacagataaacagtatccgcgccatgactgacgcggattgtcaccggttaattttacattcaggccgtgacagtaaagccggtcatcataccggtatcttcatgttccagcaggtgacagtgcgccataaacggatgcgcattggtggccggatggtcgaatttcaccagcacttcgctgacattgccttcgatccgcaccatatctttccagccctgccggtgtgccgcaggtgtacgtccgccctcgctgagaatacggaaacgggtaccgtggatatggaacgggtgcagcatcatgtcgccgacaccggagataatccagcgctccgcctgtccctgtttcacatcaaaggcactttcggtcatggagaacgggataccgttgatgctgttggcgttcatcagatcaacctcaccggagccgcagtggccgccgcgcataccgcgtcccataccattattattcattccgcccatgtgcccgccactcatatggccgcccatgccgccgtgcatgcccatcccggccatcgcctgcgggccgtatttgtcggtcagcatcatcatgccctgcatgtcgaggcgcatatccatcatcagacggaactcacgtaccggcagacgggaggtgtcgatcagcgcaggcatggctgccagcacatccggcagcttaccgcgcgcggcatcgagagtcggacggacagacagcaccggcagcgggccgtcaaacggtgccagcgtcatccccatctgacgaaccggcaaggtgacaatatcaaagacttttccgtccgatgtgtccaccagcacttcaaaccgttcccccggcagcatcggcagctcctgcactttcaccggttcggcgagcaggccgccgtcactgccgaccacatacagcgggcgtccgtcaccggctgccatccgcagactgcgggcgttacagccgttgagcagccgcagccgcaaccagccgcgcggggccatatgctgcgggtaaaccgcgccgttggtaagcatagtgtcaccaaaccagccgaccgccgctgacatcacatccagctgataatcaatttcgccgtctgcggtcagacgcttatcctgcaataccaccgggatatcatcaatgccccactcacccggcaagccggttgaagcggtattgtcatcctcaatcagcaccagcccggccagtcccatcgcgacctgatgaccggttttaccgtgggtgtgcgggtggaaccagcaggtggcttccggctgatccggcgtgaaactgaccgtgcgggtgccgcccggggcgataatggcctgcggcccgccatcctgctcaccgctgatctccagaccgtgccagtgaaccgtggtcgcttccggcagtttattgacgatatccaccgtcaccggtttaccgcgccgcagtttcagtgccgggcccagtaaatcaccgttatatccccaggtttgggtggtttttccgggaataaacgccattttcccctgctgaatattcagggtgattttttgggcattatccgctgttaacaggggcggaataccgagagccgggcgttcctgtgccgcaaaagcaaaccggctccatgccggcagcatcgtggcagcacctaagaatgcgctatatttcaaaaaatcgcgtcgttgcatgatatgcttcctttatcatcagtggtgatatgctatgacaaaatgattgggttctgttatagcgcaggctaaaccctgccctaagggcaaggtcaatgtattcccttctccggaataagggctttacaccactttagtcagcggatgacattcgcgacaaaactattaaaatcttcacataaactgacaggcgccaccggtaaactacttactatgaaaatattcattcacgctttattcagctgtgccctgctgctttccctgcccgcgaaagcgctgacgccgtcacaggctgaagacctcgccggactgactgcggtttttatttatctgaaaaatgattgcggctacggggatttaccgaatgcccgcatcgaaaaagcgatcttactgtttgccaaaagtaaccgctgggatatgagcaattatgatacccggcagatggcggaaatgaataaagagaactatttcgacatcaaacatataaagctgccggaaaactacaaatgcaccgcactggcccgtgattcactgccgttgcttgcctatgtgaaataatttacctgcaaccgaatcggttaagcggtaaaaaaacagccggagagcggatttctgtatgaatatcctcgattatcacccgctatattgatataacctctgtcaataattgatccctttctgctgataatacgctgtccggacatgataaaaatagcgctcatcgatgaccatgtagttgtgcgatccggtttcgcccagctcctgacactggagccggatattaccatcgccggacaatatgccagtgccgcggaagcctggcccgcactgacccgtccggatattgatgtggtgatcatggatatttccatgccggatgaaaacggattacagctgctcgcccgtctgcgggagcgcaaaacctccttccggaccatcattctcagtatttatgataccccggcctttgtgcagagtgcgctggacgccggtgccagtgcatatctcaccaaacgctgcggcccggaagagctggttcaggcggtgcgttccgtgcatcagggcggctgctatctgtgtgcggatgccatgcgcgcgctgcgccagtcaccgccggagaaccgggcactggaagagctgaccccgcgcgagcgcgaggtgtttgatctgctggtggccgggatgagtgtgcgggcgattgcggataaactcgaactcagccataaaactgtacatgtccaccgcgccaatgtgctgggcaaactgcagtgcgacagcacgatcgatctggttcattttgccctggcgcatcaccttatcgcggggcaataagccatgaggcgccgcgctcgtctgctgttacagtcggtatttctgctgtttacctattccctgacctggattggtttgtggatcatcggtttttatctcagtcagaacagtgtgttgtcagcgttttttctgccggaaggattgcggctggcgctgatgatcctgctgtggcggcgcttctggccgaccctgctgctggcggagctgctgctgaatatctggctggcacaggaacagctgctgtcacagccggtgatcctgctgtcgccgctgctgagtcttatcaccgcctttattatccagaccacctggtggcgttacaccctttactggcagcgcctgttgctgctgatcgccggtgtcggtatcaacagcctgctgcataccctggtgttcagtctgctgacgccgctgagtgttacccagattttcctcaccacgctgaccggcggtattctgctgacaccgtttgtctatctgatctatgaatatctccatgaacagcatttccgcctgatcctggattacggcacgccggatccgcaactgcgcacgtcgctgctgatgtggtgttttttgttctgcctggccgggctcagtgcccagctcttttttaccccggaaattgagcgcctgctggtgctgctggtgtttatccccaatgtctttatggcctaccgctacggctggcagggcggtgtgctctctgccctgctcggtagcctgatcatcacctttgcccgccagtttaacggcgcatttgccgatttacaggaattgcagatgtttatgagcacccaggcgctgattggtatcggcctcgggattgccatcagccgtcagcagcagctgtcacgtaatctgcagcgctaccgcgaacggctggagcaggagttacaggcgcggcgggatctgatgcagcagctggtgcatacggaagaggatgtcaaaaaagcgattgcccgcgagctgcatgatgaaatcggccagaacatcacggcgattcagatccagtctatgctggtcagaaaaaccgcgccggatccgcaaagcagccgtgcggcagcacaaatcaatgaactggcacaaaaaattcatcagtccacccgccagctttcacgggaactgcgtccgccggtgctgagtgaaatgtctcttgaaaatgcgctgcgccatctgattacagaatttgcgttcggggaaaacggcattcagtgcgagtttcattatgaactgaaacagccgccggaaaatgaaactgtgctgttcacgctttaccggcttgtgcaggaattgttaaataacatcagtaagcatgccggcgccacccatatcctcatcatactgagacagcaacgtgacacgatacagcttcacgtctcagataacggtatcggtatcccggagagcaaacgccgcggcggctttggcctgcgcggtattgaggaacgggtcagggcactcggcggcgactggacactgaccaccaccggcgggacccggattattgttaacctgcccacattttctgatgaaaatcacgaaaactaagacttattcctagtcatctactaccttctctcatcctttttattgacagattgattacatttgcagcctgaacgggacataacgtaatggccggaaaacagaccaaaaccatggataaaacctatcgattctggcgcaataaactgatgttatcgatgataatcggttacgccacgttttatctgacccgcaagagctttaactttgtgatgccggtgatgcagacagaactgcatctcgataaaagcgatatcggcctgatagcgaccgcgttttacctgagttacggcatctcaaaatttgtatcggggattttccacgatatcaccggttaccgctggtttatgggcgccggactgtttatgaccggcgtgctgaatattgtctttgcctggtgcctgtcgtttcctgctctgctgattgtctggacactgaacggttttttccagggctggggctggccgccatgcgcgcgcatcctgacacactggtattcgcgcaacgaacgcggcttctggtggggattgtggaatatctccatcaacctcggcggcattaccctgccgctgctgaccgcctggctggcgacccgttacagctggcagaccgccctgatagtaccgggcattatcggtatggtaaccggcctgtggctgtgcggccggttacacggcacgccgcaggaggaaggattaccgactgtcggacaatggcggcatgacccgtcagaactgcgtcaggagcagttatccccgccgctgccgatgcgggtgatcctgaaagagacaattttatgtaaccggatgatctggttactcggtttctcctacattctcgtttatctcatccggatggcgatcaatgactggggaaacctgtggttatccgaaacacacggcagcaatctgctcagtgccaatgccacattgtcactgtttgaactgggcggtttgctgggtgcggtctgtgcgggctgggggtcggatattttattccgtggtcagcgcgccccgatgattctgctgttttccctcggcctgtttattgctgtcagcgccctgtggttaataccgattcatcactacggactgctggcggcgtgtttcttcagtaccggcttttttgtattcgggccgcaaatgttaatcggactggcggcgacagaatattgccataaaaaagccgccggtacggtaacgggttaccttggtctttacgcctacttaggggcggcaatggccgggtggccgctcgcgcaggtcatggcacattacggctggcagggcatgtttaccctgctgaccagtgccgcggcactgacgggattactgctgatgccgctgctgatagctaatgtcagcaagcgggaacatctggcaggctctgtttcactctccgatgacagaaccctataataaggaatgaactgataatgaaactcaagaccctctctgctctcgctgccgccggtttatcactggctgctgttaccacatccgctaatgccgccggtcgtctggtggtttactgcagcgcgaccaacgccatgtgtgaagctgaaacacaggctttcgccaaaaaatacgatgtgaaaaccacgtttgtccgtaacggttccggcagcaccctggccaaaatcgaagcggaaaaacgcaacccgcaggctgacgtctggtacggcggcacattagatccgcattcacaggcgggtgagatggatctgctggaagcgtacaaatccccgaatttagatcagatcatgccgcagttccgtgatccggccaaacgcaaaggcaactactcttctgcggtttatgtcggcatcttaggtttcggtgtgaacaaagatcgtctgaaagagaaaggcctgccaatcccgacctgctggaaagatctgaccaagccggaatacaaaggcgaaatccagattgctgacccgcagagctccggtacggcttacaccgcgctggcgacatttgaccagctgtggggtaccgatcaggcattcgattacctgaaaaaactcaacagcaatatctcccagtacaccaaatccggtattgccccggcgcgtaacgccgcccgtggtgaatccgctatcggtatcggcttcctgcacgactattccctggaagtggaaaacggcgcaccgctggagttaatttccccgtgtgaaggcaccggttatgaaatcggcgggatcagtatcctgaaaaatgcccgtaacatggacaacgccaaactgttcgtggatttcgttctgtccaaagaagctcaggaaatcagctggaaagagggtaaatcttaccagatcctgaccaataccacggctgaatcctcaccaatgtcactgaaactctctgatctgaaactgatcaactacgatatggataaatacggtgatgctgaaacccgtaagaatctgatcaacaagtgggtcaccgaagtcaaaatgagtaagtaatgttgtctgccgcgcggtgttctgccgcgcggtcttgtttttattataataattatattgtcctgtctcattctcctgaatgaagacgggcaagggagtgatttatgtcagaaaccctgactctgcctactaaacagggacgggattccatcttcttatggctgctgatcgcgtggctgggctttgccctgttaccgtcctggagcctggattatggtttaaccgactccacatcagatgaaattcttgccgcttacggctggcacgggctgaatgtcagctggctctggtatctgctgccgtcagtactgtttttccgctcactgacacccgcttcccgcgaccagcgcggacgccactataccgatattgcgatcgccgttctgacggcagtggtggcggtagtcagcgccgtatgggaaggaaaaggtctcggctattccgccattgtgctgtttatctcgctcggcatgattatgaccctcgccctcaaacgcctggaatggctgggtggtgaccagtttgttatcggctcgctgattgcggtggtcgggctgattgcactgtttatcgtattcccgagtgtcgcgatttttatcccgatgttcaccgacaataacggggatttcgcgccgttcgcgtttgtatcgattctcacacagtcccatattgtgcaggtcatctggaactccgtgatgctctcactggcggtcggtgcgggctgtaccttcttcggtctgattctggcgatttataccagccgtatcgcaaaacgctcggcaattatcggccgtgtattctctatcctgccgattgtcaccccgccgtttattgtcggcctgggtgtcaccctgatgatgggacgttccggttatgtgaccgaattcctcgccacttatgcggggctggaaaacaccaactggctgtacggctttaccgggatctggctggcccaggtgctcgcctttacgccgatgtcctttatgatcctcgacggtgccatcaaaaccattcacccgtcgctggaagaagcatcttataccctgcgcgccaaccgtttccagacgttcttcaacgtctttatgccactgctgaaaccggcgctggctaacgccttcctgattgtgattgtgcagtcgctggctgacttcagtaacccgctggtcctcggcggtaactttgacgtgctcgccacccagatttacttctatatcaccggctcccagcttgattatcaggccgccagtaccctcggcgcctccctgctggtcttctcgctgctggtcttctgtgtgcagtatatgtggatcggcaaacgttcttatgtcacggtgtccggtaaatcttaccggggggatgtacagccgctgcctgccgctctggttgcgtttgtcaccaccttcctcaccatctgggttgtcttcaacctggtactgtacggcagcatcttctacggcagctttaccgtgaactggggcgtggattacaccttaaccctggataactttatcaagctgttcggccagggcatgaatgacggcgcatggccttcactgctcgataccctgctctgcgccgggatcgccgcaccaatcaccgccgtgctcggcctgctgatcgcctacattgtggtgcgccaggaattccgcggcaaaaagaccatcgaatttaccacgatgctctgcttcgcggtgccgggaaccgtggcgggggtgtcttacatcctcgcctttaacgattctccgttctatttaaccgggacggcagcaatcgtgattatctccatgacgatgcgaaatgtgccggtcgggatccgcgccggtatcgccggtctgggacaaattgacaaatccctggacgaggcgtcactcagcctgcgtgccggttcgatgcggacaatcttccacatcctgctgccgctgctgcgtccggcgattctgtcggcactgatttacagctttgtccgcgctatcaccacggtcagtgccattgtgttcctcgtgacaccggacacccgtgtggaaaccgcctatattctgaaccgcgtggaagacggcgagtacggcgtggccattgcctatggctcaattctgatcgtcgtgatgctggcgattattttcctgttcgactttttgattggcgaagcccgtgtttcacgttccaaagccaaaaatgcacagtaatcatggagtaaccgacatgacacaacaaagttttgttgaattaaaaaatgtgactaaacgctttggcaccaacacggtcatcgacgatttaagtctttctattccggcgggcagcatggtcaccctgctcggcccgtccggctgcggaaaaaccaccgtgctgcgtctggtggcggggctggaaaaaccgaccgaaggtaagatgttcattgacggcgaagatgtcacagaccgttccatccagcagcgtgatatctgtatggtgttccagtcttacgcactgttcccgcatatgtccctcggcgataacgtcggttacgggctgaaaatgctgggccgcccgaaagcggaagtgaaagagcgggtggaggaagccctggagctggtggatctggcggggttcgcagatcgctttgtcgatcagatttccggcggtcagcagcagcgtgttgcactggcccgcgccctgatcctcaagccgaaagtgctgttatttgatgagccgctgagtaacctcgatgccaacctgcgccgcagcatgcgggaaaaaatccgtgaattgcagcagcagtttaatatcacctccctgtatgtgacccacgaccagagcgaggcctttgcggtctcggatatggtgctggtaatgaataaagggaaaatcatgcaactgggatcgccgcaggagctgtatcgtcagcctgcctcgaagtttatggcgagctttatgggtgatgccaacatcttcccggccacactgaccggtgatgccgttgagattttcagctaccgcctgccgcgtccgccgcagttcgtcacggataaaagcagtgttactgtcggtgtccgtccggaagccattaccctgagtttgcagggtgatgagagccagcgctgcaccgtgtctcatgttgcctatatggggccgcagtatgaagtgaccgtcgactggcacggccagtctatgctgctgcagattaatgccacacaattgcagccgtctgtcggcgacagtctgttcctgcaaatccatccttacggcatgtttattctgccggaagagcagtaattttcccctgaaatgcaaaaccgcttcctcacggaagcggttttttgtgttgctcacactacccggtcaattattttttatagctgtaaccggctgagaaattctcacgcgcctgctcctgagcggcatcgaagaaggttgccacctcttctgctgtctgtttcggcagctttttcgcggctttctgaatacggcgcagtgcttctgtcgcatcagaacggattttatcggtattctgctgtgtcagcttaccaaagcgttttttcacatcgccgttgataatcaccgtatccacaccggatgatgtggtctgcagcacaaccgaacccgccggataactggacggtacaaaggcttctttctgggaaacgataataatatccgcttttttacctttggtaagcgagccgatctctttctccatccccatcgcttccgcactgccgtgtgttgcccaggtcagcgcatcacgtacgctcaggtcaattttggtggtggttttaccggtacggtttgcttccgcttcactgtccatacagcgctggaactgaagacccagacgcatctgcgagaacaggtcaccggaaccgacacagacaatatcgctgctcaggccgggtttaaaaccgtggtcaagactggcgcggaacggcggacgccccatccccatctgcatttcagtttccggcgcaatagagactttaccgccggtctctttcaggattttccactcgctgttatccagtgaagtacagtgaatgtggagatggccgggcttcagcagattattgtgtttcagctcatgtaaccctttcagcagaatggatttttctgccgcaccggtatgagatgccacaaagatacccaggtcattggccagctcaatctctttcgcggtatgcgcaaacggaatggtaccgaaatcactcagcagcacgcccatctggttcagggttttattaccggaaccataatattgctgatgaatatttttcatcacatccaggcgctgctgatggctgcggaagcggttactgcctttataatcataggcctgcataccataagcatagatactgcggatcccggaggcacgcagggattcaatcgccgccggcgcatgatcaggtgagttaacacagtcacagcagtcaagaatggtggttaccccggcattcagtgcctcaaccgatcccaccagtgccgccatgcggatatcttccggctccatgactgaaccgataccgtagaaagtagagccgaggaaaccggccagtgacatatccgcggagatcccgcgcagcagtgacatccaggtatgacggtggctgtcgataatccccggcaggataataccgccgtccgcatcaatcagttccgcatcaaccccggcaaatttggacaccgggccgacatcgacgattttatcgccgtcaaccagcaccgcaccatcttcaatatcaccgtactgctcatccatagtgataagatagccgttataaatcagctttttacgcttatctgttttgatataacttttatttttgtcatctgcccctgtcagcacggcattgccgcctgctaatgcagaatggctgccgagcgcaccggccgccagccccattgtgccgagaccggcatttttcaggaaagatcgtcttgaaggatcctgcgctttttctgtcatttgattattactcctcacacggttaacagacaccataaatgtactaattagtacagtttttaaagtctaacaagactcatttgtattaaccagtacatattgtgtgatttcctgaattgacagataccgggcacagtttttgttgtgatctttttttatactggcaaacttattttttgtatgaatatcagggaagaaaccataatgtgcctgtctcattcatttctcaggggaatcgttatactgatgctgtgcgggatgttaagtggctgcggggtgttttatggcgccatgtgcggcggtatggctatatttacgccgtcagaatcggtgaccaaaatcccggcaccggatgcggtggccggtcagtcgtatgagcaaacagttgaaatcacccggcacgcaggaatgatcccgttttatgtcagtgagaaaccggactggatgacggtcacactgatgtcaaaaaatgaggccggggaatggataccgcttatcaccgatgaggagtggcagacacgggtgatgaaagccgatcagcgcccactgatcgctgcccgtttgcagggaacaccggcggagcgcgggaaagtcagggtaaatatcaaaggaatgtcttaccgcaacatgtgcggaaactcagacccggtctattctgtgcggctgacagtgaaaaaagcggagtaattacttactccgccgttcctgaatatacaacaccactgacggcacgctctgaataatcagcatgcggagaatatggttaagcatgacaaaacccgcatcgatccccatcgcaattgcggcaaatgtcatggcttccatactgcccggcgcccaggagagcagcagcatcgggaaggaaaaaccggtcaggtgagacgccccgaatgcaatcattgcggtcagcataatattgatcagcaccacctgagcggacgtcaccatattgcgcagcagtgacctcagcggaaacagaacaaaatagctcccgatatacatgccgatcagcgtcatactgatatcattcagcggcagcgggaaaacaatgtaagtactcaccatgctctgcaccgcaatcgccgtgcccagtgatgtcagcataaacggtgccgggacattgattttctccagcgctttgccggacaaatacccgcacaccacaatcaccagcagccacagcacggacaccagactctgcggcggaatatccgcaggcggcgggacaggatgatcactgccgaccaccacacccgccagcataatcagaataatcaggcggatagtatgggaaatcaccaccttctgcggcggtgtaccggtgtgatccatcagcgccagaatcgccgccattgcccccggcaccgctcccagcagagattcctgaactgaccaccccacccgtttgcggaaccagaggaaactgacggtaaactgcaccgccagacacgacaccatgatgagcataatcagcagaagatgatcaaactgactgagatcgacacgggtaaacatcagcccgacggatgttccgagcaccatctgaacaaaggttaatgttcccttaggaatagtgagcgaaacattgaaacggtgcgcaataataatcagaatgatagggccgaacatcagcgccatcggcacgttcaggtatgccagcaataatccggcagcaaaacagaccgaaatccctgctgcagttttgataatattcatattgttataatgtcagccggttgccggaacagaaaatcagtctatcaccggaatcaattaattacaggggatataattatgcgcgtaactttctcaccgtcagaggcggaaatcagtgtggtgcaaaatggactacgcagccataacaccgcctttttcgatgaaagcgagcatactgaactggctgttttccatgaggtaaacggcgaaatcaaagccggactgaccggtgatatcatcggtaactggctgcggataaaatatttatgggtggataaatccctgcgcgggcagcgtatcggtacggcattaatgcgtcaggcgcaggaaagtgcgcgggagcgcggtgcaaagtttgcccaggtggataccttcagtttccaggcgcgccctttttatctgaaaatgggttttgaggaagtgctgacactggaatcctatccccggacgcatgagcgtatttcctttcgcaagacgttagaacagccgtgattacggctgctcatcctgttgtgtccggctgtccgccatggcctgattcagaatcgcttttgccatccactgggtaatatcgatgacctcaccgtcattcattttccagatatctttcatcaccaggaacacttccgagccgtacaccagcgagaatgcgcggatcactttatccagtgtttcctgatcgacatgcgccttcagcggctcggtgacattagccagaatcgccttgcggtgccctctgaccagttttttctcatcattcgtctgggatttggccgaggccgagcgatcctgcgcccactgctgcaacgatacatacagtgccgcacgcagtgcgccttcgtggcggaacatctgcggataagcgaaagccagtaattgctccatccgatcgcgggtttccgggctgtcggagcgccaggtcagaatcgggccgaggctcgcatccacggtggcggcgatcaaatcactttgtgtcggaaaatagcggtaagccgttgcccgtgacacaccggcttccgccgccagttcagagactgacggtatagcgccctgttcaaacagtgccagcgcggtattaaccagcagattaaatgtccgcttacgcgtgccggagtatggtgccccatcatcagtacaggccataactgattttcctttaacgattttctgtgaattttgcgcggctatcttacacaacatccccgccggcaacacccttatggtgttttttttatcaaaaaactgatttaaagatagacaaattgagatgcatgtctcaaaattagccaaacaaaatgatactacagtctcattctggttatgatgcgttatcagacatccgatatccctttgaggttaaccatgaacagcaataaaggcgctgtctatatcgccacaacgctcgataccaaaagtgatgagattttttatgtcagtgagctgatccagcgcaccggcctggctgtaaagactgtggatttaaccacaaaacccggccagctggcccgggaagcggatgtctgcgcccgcgacgtcgctgcctgtcaccctgacggcgaaagtgcggttttctgcggcgaccgcggccgtgctatcgcagcaatggctgtcgcctttgaacgtttccttgcaaaacaaaatgatattgcagcacttctcggtttaggcggatccggtggaacggcactgattacaccagcaatgcaatccctgcctgtcggcatccctaaactcatggtttccaccatggcctccggtgatatttccggctatatcggcgcaagcgatattgccatgctctactctgtcactgatgtctccggcctgaaccgaatttcacgtaaagttctccgtaatgcggctaaccagattgccggggcggtttacttctgtcaggaagagcaggttactgataaacccgccattgccctgactatgttcggcgtcaccacaccgtgtatccagcaaatcagcaaagaactggaagcggattacgattgtctggtctttcatgcgaccggcagcggcggtaaagcgatggaaaaactggcggatgaccatctgttcgacagtatccttgacctgaccaccacggaagtgtgtgactatcttttcggcggcgttctggcctgtgatgaagaccgtttcggtgctattgcccgctcacagacgccgtatatcggctcctgcggcgcactggatatggtcaatttcggccgcccgtccaccgtaccggaaaaatacgccgatcgtcagttttatcaccacaacgcccaggtcaccctgatgcgtaccactccggaagaaaatgcccagatggggcgctggattgcagaaaaactcaaccagtgtcacggcgatgtcatttttatcattccggaaggcggcttctccgctctcgatgctgaaggtatgccgttctggtcaccggatgcggaccgcgcctttattgaggcgttcgaaacccattataaacaaacagaaaaacgtattttacgcaaatgcccgtatcacattaatgacccggaatttacccgttttgtcattaatcaacaccagcaattacgggcgaaataaggagacacaagatgccactttcccgtgacgcattactgaaaaaattcaatgacatgatttcacgcggcgagccgattatcggcggcggtgccggtaccggtctgtcagcaaaatgtgaggaagccggcggtatcgatctcatcgttatctataactccggccgttaccgcatggcaggacgcggctcactggccggtctgctggcttacggtaatgccaatgaaatcgtcatggatatggcaaaagaagtgctgccggtcgtgaaacatacgccggttctggcgggtgtcaacggcacggatccgttctgccagtttgataaattcctcggcgatatcaaagccaccgggttttccggcgtgcagaacttcccgacagtcggcctgatcgacggtaaattccgcgccaatctggaagaaaccggcatgggttacgcgctggaagtggaaatgatccgcaaggctcatgaaaaagatctgctgaccacaccgtatgttttcagccgcgaagatgccattgccatgactgaagccggtgcggatatcctcgtgccgcatatggggctgaccaccggcggtaatatcggggcagaaacagccaccacgctggatgactgtgttgagatgatcaatgactgggcgaaagcagccaaagctgtccgtccggacattattgtattgtgtcacggcggtcctatcgcgaccccggaagatgcacaatacattttagatcgctgccctgactgccacggtttttacggtgccagttccatggagcgtttaccgacagaagtggcattaaaagccaccacagaagcgtttaaaaatataacaagataattaaattatttattttttaagtcaacaccgggtgcctgcaatatatattgcaggcatttttttatgttatttccggactgccacaaaaatacggctgcgaaaattctgataatagaacacgatcagcctgttattcctcacacctcccgcaaataggtataatttcggatacgctaaccgcggccccgcgattagaattgctgtttgaacaaaaacatacctcagtaattttatttactctccgtatgattaaggattggagtccatattgttccggcaggaagcgctcgataacagaaaaatgaaatggcggggaaaagcattattgctgcccggaattccgttatggataattatgacggcatgttccgtattcctgattgtttttcttatttttattattttcggatcttacacccgccaggttaatgccacgggggaagtgaccacctatccgcgtgctgtcactatttatgctaacgcccagggatttgtcacaaaacaatatgtccgtgaaggccagcatattaaaaaaggcgatccgctctatgttattgatgtcagcaaaacaacctccagcggcgtagtgagtgataatcagcgccgcgaaattgaaaatcagcttctgcgtatcgacagtatgatttcccggctggaggataataagcgcgacaccctcgatgccctcgaaaaacaaaaatccctttatattgatgcctataagcgctcggaaggcattgtaaaacgtgccgaagaagggatcgccattatgaaacagaatatggagagttaccggggctatcagaaacagggattaattaataaagatcagcttcttaatcaggtagtgacttattattcccagcagaacagcctgctgaacttaagcggacagaacgaacagaatgcgctgcaaatcaccgcgctggaaagccagatcctgactcaggccgcagaatttgataaccggatttatcagatggagctgcagcgctatgagttgcagaaagagatggtgaatacggatgtcggcggcgagataattgtccgcgccctgacagacgggcgtgtggattccctcggcgtgaccgtcggtcagatggtcaatcc

SEQ ID NO: 71 - DNA, 990 bp, unknown
  Altogen 322075 strain
tgcggttttatccgctgccagagaggcaagctcttttttcagctgtgcgctctgtttgtcactgtcagcattaccggccgcaatctgtgccgccagtgcctgtttttcagtatcacgctgtttcagttgctgctccagcgtactcagttgctgaaccattcttgccatatcggcatttttactgctcagctgcgcgatacttttttcagcctgtgcctgctcttcggtcagccgggtgatttgcccggtcagcgccgctttatcagcggtcagtgcggtcagatctttttgcagctgcgcattctgctgctggttatcggtggttttctgcagtaattcaaacgcaataacttgtttttccgctgcacttgctttcagctgtttttccagctctgcaacctgtgcggcggttttctgcatttccgctgttttcgcattcagcagttcagtatttttggctgaggcgctgcttttatctgcagtcagtgcagtgatctgtttttccagcgctgctttttctgccgtcagtccgtcgagggattttttcagctctgcgctctgtttcgcacttttactgccctgctccgccagttgtgcggtcagtgccagtttttcagtatcactttgtttcagcttactttctgttgccgtcagctgttgcgtaagttttgcgaggtcggcatttttactgccgagcagtgcgaggttctcttcagcccggctcttctctgaattcagctgtgcaacctgtttttcaagcgcggatttatccgcagtcagcgcggtgatccgtttttccagatcagctgactgtttgccgttttcggtttcctgagattgcagttttgctgtcaggcgctgtttttccgcatcctgagcctgtaattgtttttccagctcagtcagcttctgcgtgacttttgccataccggcatttttatcctgcagcagcgcgagatttttttccgcctgagcattatcggatttcag

SEQ ID NO: 72 - DNA, 181 bp, unknown
  Altogen 322075 strain
agatctgtttttccagtgctgctttttctgccgccagcgctgtcaggtcttttttcagcgcgtcgctctgtttgctgttttcactggtcagcgcgtgaattttgtcactcagttgctgtttttccgcatcccgctgagccagctgtttttccagttccgtcagcttctgcgtgacttttgc

SEQ ID NO: 73 - DNA, 17692 bp, unknown
  Altogen 322075 strain
taatctgcttttccagtgccgctttttctgccgccagcgctgtcagatcttttttcagcgcgtcactctgtttgctgttttcaccggtcagtgcgaggattttgtcactcagctgctgtttttccgcatcccgctgagccagctgtttttccagctccgtcagcttctgcgtgatttttgccatatcggcatttttgctttccagcagtgcgagatttttatctgccagcgctttttctttattcagcgccgcaatctgtttttccagatcagctttttcggctgtcagagccgtgacctgaccttccgcctgaccaaaacgggccagattttcgcttatctgctgattgagtgaatcaatcgttttgcggttctgttccagctctgcggtcagtttggcgctgtcgccttttgccgcagcctgtaactcattatttgccagagtcagattgttgagttctgtctcttttttcgcaatatccgcgagcgcctgttcataattatgctgaacattccggtacttttcgttcagtgacgcgagttcacgtttcacatcctgtaatttcaggcgggtgagacgcagctgtttctgcgggtccgacggtgtaaaccaggtttccggtttcagcacacgggcaaccgtcagcggcagatcagagaaatacgtcattgaacggaaaggttcacccaggatggcaaacaaggcttccggtgtgagagtcagtgaggaggtcatacgggaaggaaccggcgagaacacaaatccccggtgatttccgccccatttctggctgccacggaccagataagccggagaccactgcgggtatccgaccggaacaggattggtcacaacaaccggttccctgaccacaatattttcgcattgtgccggtacggagatccccggggttgttgtgtcagttttctgtgcggcagctgtttgtgtccggctttcctgcgcggacgaaacagtgcgttttcctgtgcgggcagctttacgtgtgccctgacgctgtgactgagtggccttacccgccgtatttaccggcggtgtaacccgggtttcgggagacctgccaggttgctgcactgataccggaaaattgcctgatgctttttcagtctgaatataacggtcaaaatcttcaataacctgattaaattcagatgcagttgccggttgcactgccgcaaacaatgcgacagtaatacacaacctgatgttcagtctcataacccgttaaccttctccagggtattctcaatagacagaacagaataataacgaacctgggcacacatcactttggttttcgcttcaatcgacatcttcagtaatttaagcgtatccgggctggcggttctttcgagctgacgatacagtctgttgatctggctgatttcgctgaaaccggcgaccatctgactgtaatctttcggagagatagttttgagcgagtcgagttctttaacacacatactcagctcaggcgaaatctgtccggagggttgctgcaattcaggtcttggcaaaggagcagtcgttctcaccggctcctgctccgccggctgaaccggttgtgccgcaggcttcggcgcagagggtgttgttaatgaacagccggacagggttacaacgcctcccaacaggagtatccccgccattttgttcagtgctgtcttggataacatagtttcaccttagagaaataatttggccactgctgcgttgtgcaaaaataggcaccaattgtatagccagagccggggaaaataaactctgacgtgtcacaactcaggcttatgtaacatacactacgtcgcgggcgagtctgaactattcgttttttgttatccgaacaccttactgcagccgcacaatctgaattttcacgcttgtcagcgtcaacgatttggcttcgttattattctgctctgccggtctgtttcttacaggccgagaacataaattagtcagtttaccttacaaaacagtaccggaatatttgccggacagtttgtaacaagtcttaaaaataagtatcacccggtatctgtccatcataaaaagaatataagcacagttgtacctgaggcggcattatatcttattcacgaataaaatcgattaaccgccgcagacaaccattctgtaaatatgaaaataaaacgacagatacagaacaaatacataacccgctgttatcccggatgattcacggcagtataaatgaataattccgttatggattctctttttttcaattatgcgaccgggattccgttcctttttccgggttgattattatcattattttcttagtaatctattatcttcttataatttaaaagcgacagaatttatcaggtttattacgcattatatgattagtaacgctatcaaactataaattatcattctgcttctgcggtactccgggattatcaatacagacacatttttctctcaatatgagagaaagcgggacaggaaaatccgctgtttcctgccggacacccttattttttttacctcagtcacaaatcccccgataaattactgtttttctccctgctggcgtatttattgcttgtttttatgcatgcttactttttcctgaagccggagaaataataatgtctgaagcagtcggaaaacgcgcgctgggtacgccttacctgcgcgttgatgccctgagcaaaacatcagggcgggcgcgctacacggatgatctgccgatgccgggtatgcactacgccaaatatgtccgcagtaccattgcccacgggatcgtaacatccgttgatgcgtcacaggcgctcgccatgccgggtgtggtcgcggtattcacctgtgacgatgtgccgcagatcccgttcgccaccgccggtcacgcctggtctctggaaccagccaaacgcgacgtggcagaccgcctgctgctgaaccgccatgtgcgccaccacggcgacggtgtggcgattgtggttgcccgtgacgaactgaccgccgaaaaagcagcggcactcgtcagcgtcacttatgacgaactgccggttatcacctcaccggaagcggcactggccgcagatgccccgcaaatccacagctgcggtaacctgctgaaacgtaccgctatcaatgcggaaagcgccagagcgacagtcagtcagtcgccttttcagttccgcggccattttgataccccggtggttcagcactgccatatggaaggcgtcacctgctacgcctggcaggaagcggataataagatttccgtggtgtcgagtacccagatcccgcacattgtgcgccgtgtgataggccaggcgctggatatgccgtggtcgcatatccgggtgattaagccgtatatcggcggcggtttcggtaataaacaggacgtgctggaagagccgatggccgcctggctgaccctgaaactcggcggtattccggtgaaagtggagctgagccgcgaagagtgtttctttgcctcacgcacccgtcacgccttccatattgacgcagagatggggctgaccgccgacggcacactgaacggctatcatcttgatgtgctgtccaataccggtggctatgcctctcacggacactccattgcggctgcgggcgggaacaaaatcccgtacctgtatccgcgctgcgattacggctattccgccgccaccgtctataccaactacccgtcagcgggtgcaatgcgcggctacggggcaccacaggtcacgttcgcccttgaatgcctgatggatgatgccgccgcacagctgaatattgacccggtggatatccgtctgcgcaatgcggcgcggtccggtgactgtaacccggtcaataagaaaacgatttacagtgcggggctgattgagtgcctgaagcgcggtaaagagctgttcggctgggatgaacgcaaagcagaggcgctggcaacacgcggggatatccgccggggcgtcggtgtggcctgtttcagctattcatccaatacctatccggtcggcgtggaaatcgccagtgcccgtctgctgatgaaccaggacggtaatatcaatgtgcaggtcggcgcgacggaaatcggacagggctcggataccgtgttctcgcagatggtggcggaaaccctcggcgtgccggtcagtaccattcagatgatctccacccaggatacagatatcacgccgtttgacccgggtgcgttcgcgtcacggcagagttatgtcaccgcaccggcgctgaaagaagcagcgctgtcactgcggcagaaaatcctcgatcacgcctcactgatgacacaccaggccgcgtttaatatgaccattctcgacggcaatgtggtgcttgaggcgcagccggacgtggttgtcaccaccgtcgcggaagtggcaatgcacagtttttatcatcaggagatcggcggccagctttctgctgaatcttcttataagacacagacaaacccaccggccttcggctgtacttttgtggatgtcaccgtggatattccgatgtgtcaggtgaccattaaccggatcatcaatatgcacgattccggccggatcctgaacccgcagctggcggaaggccaggtccacggcgggatgggaatggggatcggctgggcgctgtttgaagagatgctgatcaacgagaaatccggggttgttcataacccgaacctgctcgactacaaaatgccgaccatggttgacctgccggatctggagtgcggatttgtcgaaacctacgagccgcagtccgcttacggccataagtccctgggggagccaccgattattgcgccggctgccgctatccgtaacgccgtgcgtatggcgacgggtatttctgtcaatactatcccgctgacaccaaaacggctgtaccgggaatttgttaatgccgggcttatcagggggtaactgccatgtatgattttgaaacttatcaccgtgcggagagtgtcgcacatgccgtctcactgctgacggcggatccgcaggccagattgctggcgggcggaacggatgtgctgatccagcttcatcacctcaatgaacgcttccgccgtattgtggatatccatgatctgccggagctgcgcgggatcagctgtgatgatgcgggacatatccgtatcggctccgcgaccaccttctccgaactgattgacagcccggtgatcaacaagtgtctgcccgcgctgagcgaagcggctgccaccattgccggaccacagatccgcaacgttgccacttacggcggcaatatctgtaacggcgccaccagcggtgactccgcctgtccgtccctggtttatcaggcagagctggagatagccaccccggacggcatccgccgcagaccactgcgcggcttccataccggtccgggtaaagtggcctttgaaccgggtgaactgctgatcgcgttccatttctcaccggagaattacctcggaaaaggctccgccgcttataaatacgccatgcgcggcgcgatggatatcgccaccattaactgcgcggcactgtgtgatatcagagaaggacgttttgaggaactgcgcctcgccttcggggttgccgcgccgacaccggtccgctgtgaacacgcggaagcggctgcgatcggaaaaccggtcaccgcagacaccctgaaagctgtcagtcaggctattgaacaggatgtggcaccgcgcacgtcatggcgggcagagaaagagttccgtttacacctgatccgcgtcctgagtgagcgggtgatccgcgcggcggctgaacgtctgggagaaaaaatcgcatgaatatcaaagaatggaaaaccatcagctgcacactcaacggacaggtacgggaactgacggtgtcaccggcggcacggctgtccgatgtcctgcgtgagcaggggcttatcagtgtcaaacacggctgctctgtcggtgagtgcggtgcctgcacggtacttatcgacggtatcgcggtggatacctgtctctatctggcggtctgggcggacggtaagcagatccgcaccgccgaaggtgagatgaaacacggtaagccgtctgcggtacagcaggcttatgcggacagcggcgcggtacagtgcgggttctgcactccgggcctgattatgatgaccaccgccctgctggaaaaacacaaagggcagaccctgaccatccgtcagatccgccacggtctggccggtaacctgtgccgctgcaccggttatcagatggttgccaatgcaacggataaactccagcgtaatcagtaaaccgcagaaaacagacaccgccttcagaacggcggtgtcagggttgtggtgtctgttgctgtaaaagtaccggcagggcatgctcttccccccagcttttcagcatcagtaagatcggtaccagcgactgcccggcgtccgtcaggctgtattccactttcggaggcacctccgcatagaccttgcggtggacaagccccgccatctcaagctcccgtaactgttttgtcagcatacgcggggtaataaatatcagcagccgtttcagctcgttaaagcgtttgatgccgcttatcagatggtaaaggatcattcccttgccctttccgcccatcatttccagtgttgcctcaaccggacaggcttcataggcatacgattcataacgcgtctttctgacagtatccattttgtacctatataccaaaaatgtacgtacttgttaaaaacacatcatagtttatcattgcgccggttaatgtaaattaccttataaggacgtcatcatgaccatcactcaggctgtaatgcagcgttattccaccaaatcctttgatccggcgaaaaaaatcagtgatgaggtgatgaacagtatcaaaacattgctgcgctacagcccgtccagcgtcaatatccagccgtggcattttattattgcggccagtgaggaagggaaaaaccggatcgcggcatccacccgcccgggctttgaatttaataccgcaaaaatcaccgacgcctctcatgttgtgctgctgtgcgcaaaaacagatgttgatgaagcctacatgaacagcgtgctggaacaggaagacaaagacggccgttacgccacaccggaacacaaagcgatgaataacggcggccggactttctttgttaatctccataaagaaacactcggtgatctgccgcactgggcggcaaaacaggttttcctgaacatggggacattactgctgggtgcttccgcgctgggtgtggatgctgttccgatggaaggaatggattttaataccctggataccgaatttgatttatccgccaaaggactggctccggtagccgttgtgtcgctcggttaccgcaaagaggatgactttaacgccgcgctgccgaaatcccgcctgccggaagagcagatcatgaccgttatctgatacgaaaaagccgcgcggaccggtaacatccgtgcggcttcggcacacacacattttcttccgctttctgctacccggcggataactcgtacttcttaatcttccggtacagagtggcaataccgatccccagctcctctgccgcctgacgtttgttgtcatagcgctgcagtgcttcgcggatcatctgtttttccatctcttccagcatggtttccccgtgcagtgccggatcctcatccgctgctgccgcaggtacacttctgaccggaatggtaatttcgctgcggtgaatatccccggtattctgaaccggtgcggcagtcccgcttatcatctgccccgcatgtctggcaaagttcggcggcagcagtgagatatcaatcacctcacccggcggcaccacgttcaccagatattccaccaggttactcagctcacgcaggttacccggccacggccatgcattaatgaccgccatcacctcatccgaaatgcccggatacaccagaccgaggcgcttggtatgcacattgaggaaatggtgcaccagcagctccacatcgccgtgacgctcacgcagcggcggcagggcaatcgggataacattgaggcggtaatagagatcctcgcggaatttgccttcactgacaaactgttccagattctggttggtcgcggacacaatccggatatcaaccggaatagtccggcttgagccaatcggctgcacttcgcgtgattctatcgcacgtaataatttcgcctgaacaatcagcggcatatcgccgatttcatccaggaacagcgtgcctttatccgccgcctgaatcagaccctgttttccgttggcggatgcgccggtaaacgcgcctttcacataaccgaacaattcactttccagtaactgctccggtatcgccgcacagttgatggcaataaacggtttttcactgcggttactcagcttatgaatagcccgcgccaccacttctttaccggtaccgctctcgccggtgacgagaatgctcgacgggctcggtgccacgcgggaaatcaggtgtttcagctgacggataggttcggattccccgaccaggtgttcaatcagcaatccgttttcatcacggcgcacttcattcatatcaatcgccgcgtgggactgatgaaacgccatcaggaacatctgacagccgttaaccacatgaagctgcccgataataatattgctctccccttcccaggagacaatatgctgtaaatgcccgcggttcagactcttgaaataggtcagcggacggatggcaatggttttgccggaaatcttttcatgcgggacattgaggatcttcagagcatgcggattggcaaatttcaggtggtttgcctcatccaggatcagaacgccctgatccataaactctatcaggctcagtaataccttctgcgcggcattacggccttcctgttcatccagcagcttagccacaaaaatattggaaatatgctgcacataatccgagaagtcatggatgttatcccggatccgctcctgctgttcagaggtgacagccaccaggctgataaccccgatacagcgatcctggaagatgatcggtgtaccgataaacgctttctccttacagttatctttatccgcgcaattgaggcagagcggatcaaaacaggagtgcgtgactatcttttcttttttggtatccagcacatagcggagcagctgggaattattggtcagacgatgtccgaggtgctggttaaacagccctgttccggcaatccttgtcagtttgtcatcaacgatttcaacatcaagctgtaacacactggcgagcattttgctgaagtgaacaatcgtcggctgtatctgcatcagcacagatggtgatttttcagtgatcatgcttacgacttcctatgctcttaaaacgacatatcgaaaagaaagttcataacgcgacaaattaatgattttattatagttatttatcaacgggctgaattatcacccaccgatagcacaagattgccagatctttatcaccgaaactctaacgtatgtacaaaaatcacacttttcttcagatttgataatgaaactggaatctccgtcactctattttatcaatatgataaatccgccggggtgtttatcattctggccccgcttccggcggttccgccctctcaccagtctgatcccggtgacttttcacctttgctgaaaataacttttattcgcatttgtcacacataaccaggccttcagcccctgataattgtgatcaccctcccgaatccgccctgcatttcacccccggcagaccattccggctgatttggcatgcttattgttaatagtcacagtacacatgcagaaatgccttcttctcactgcatattcaattgtcaccggccatttcacataggatttaaagatgaaaaacgttaatgaattattgaaagatatcgccagactgaaatctaatcttcatcaaaaggattttttgcttacctgggaacagagtcaggatgaactgacgatggtgcttgatattgcagccgcactgaaagggctgcgtgccgataacatcgcaaccaacgtattcacaaatggccttggcatctctgttttccgtgacaactccacccgtacccgtttctcttatgcttctgcactgaatatgctcggcctggcccagcaggacctcgacgaaggtaagtctcagattgctcacggcgaaaccgtacgtgaaacggccaacatgatttcattctgtgcggatgccatcggtatccgtgacgatatgtacctcggtgccggtaacgcctatatgcgtgaagtgggtgcggcactggatgaaggttttgaggaaggcgttctgccgcagcgtcctgcgctggttaacctgcagtgtgatatcgaccacccgacacagtctatggctgacctggcctggttacgtgagcacttcggttcactggaaaacctgaaaggcaaaaaaatcgccatgacctgggcgtattcaccaagctacggtaaaccactctctgtaccgcagggcatcatcggtctgatgacccgctacggtatggacgtgacgctggcacatccggaaggttatgacctgatccctgacgttatcgatgtggcgaaaaacaacgccaaacagtccggcggcagcttcaaacaggttacatcgatggaagaagcgttcaaagatgcggatatcgtgtatccgaaatcctgggcaccttacaaagtcatggaacagcgtaccgaactgctgcgtgccaatgaccatgacggcctgaaagcccttgagcagcgctgcctggcacagaacgccaaccataaagactggcattgtactgaagagatgatgaagctgaccaaagacggcgaagcgctgtacatgcactgtctgcctgcggatatcaccggtgtttcctgtaaggaaggggaagtggaagaggctgtattcgagaaataccgtatcgccacttacaaagaagccagctggaagccgtatatcatctccgccatgattctggcccgcaaattcccgcagcctgccctggttcttgagcaactgctgaaaaacgcacgtaaacgtattttataaatccggatcccggccgtcaccggccgggttcttttcccgatgatatgaggtgaggctctatgtctgtcttctcactgaagttagatatttcagataaccgttatttcaacggtaaacactccccgcttttttcccgtgaagaagcacataaagcgctgaagtttcatgagaaaattacgggttaccatccgacaccactgtatgacatgaaagatctcgccgcgctgttcggcgtgcgtaatatcctggtgaaagatgagtcacagcgttttgatctgaatgcattcaaaattctgggcggctcttatgctatcgcccacctgttgtgcgaaaagtacaacatggatattaacgatttctctttcgagaaactcaaaagcaccctgactgaaaaaatgacgttcgccaccaccactgacggtaaccacggccgcggtgtggcctgggcggcacgcgcactcggtcagaaagcggtggtgtacatgccgaaaggctccgcacaggaacgtgtgaatcacattaccggcctcggggctgagtgtatcgtcacagatatgaactacgacgataccgtccgtctcaccatggaaaatgccagaaaacacggctggatcgtggttcaggataccgcctgcgaaggctacaccaagatcccgacctggattatgcagggctacaccacactggctgccgaagcggttgcccagatgaaagagatgaagattcagcgtccgacccacgtgctgttacaggccggtgtgggtgcgatggccggcggtgtgctgggctatctggtcgatgagttcggggcaaaagatctgcattccattattgtcgagccggatctggctgactgtctctaccgttccagcctgaaaggcgaaatcgtcaatgtcggcggcgatatggccaccatcatggcgggtctggcctgcggcgagccgaaccctatcggctgggatctgatgcgtaactgcgcgacacagtttatctcctgtgaagatgcggtggctgccctcggcatgcgtgtcctcggtaacccgtacggcaaagacagccgcgtgatttccggtgaatccggcgcggtcggtctcggtgtgctggctgcggttaactatcatccggaacgtgcggaactgatggcaagactcggcctgaacagtgattccgtcatcctcgtgatcaacaccgaaggtgacacagataccaaacattaccgtgaagttgtctgggaaggtaaaaacccggcgcagaaatattaactaattggagtattgaaatatggctaagcaaatcccgtttgatgaaattgtcaaaaaagctgaacactataaaaaagatatgacccgttttctgcgcgacatggtggcaattcccagcgaaagctgcgacgaaaaacgcgtgattcaccgtatcaaagaagagatggaaaaagtcggctttgataaagtggatatcgacccgatgggtaacattctgggttatatcggtcacggtccgcacctgattgccatggatgcgcacatcgataccgtgggtatcggtaacatcaaaaactgggaattcgacccgtacgaaggtatggaaaacgacgaaatcatcggcggacgcggtacctctgaccaggaaggcggcatggcctctatggtctatgccggtaaaatcatcaaagatttaggtctggaagaccagtacaccctgctggtgaccgggactgttcaggaagaagactgtgatggtctgtgctggcagtacatcatcgagcaggacaaaatcagaccggaattcgtggtcagtaccgaaccgactgactgccagatttaccgcggccagcgcggccgtatggaaatccgcattgatgttccggggatcagctgccacggctccgcaccggagcgcggtgacaacgcaatcttcaaaatgggtccgattctgggtgaactgcaggagctgtcaaaacgtctggccactgacgatttcctcggccagggcacactgactgtttctgaaattttctacacctcaccaagccgctgtgctgttgctgacagctgcgcagtctctatcgaccgccgtctgacctggggcgaaacctgggaaggcgcactggaagaaatccgcgcattaccggctgtcaaagcagcgaaaggcgtggtctctatgtacacctatgagcgtgcctcctggaccggtctggtctatccgacagagtgctacttcccgacctggaaagtagaagaagatcacttcaccgtgaagactctggatcgcgcttaccgcggcctgttcaacaaagagccggttgttgataagtggactttctccaccaacggtgtttctatcatgggtcgtcacggcattccggttatcggttttggtccgggcaaagagcctgaagctcacgcaccaaacgaaaaaacctggaaagatcacctggtgacctgtgcggcgatgtacgcggccattcctttaagctacatggctgaaatgaaaaaataatcttgtcttaccggccccgtactgatgtgcggggctttttcaggagtaccccctatgcgcacactgattatcaacggcaccgttgtcaatgcggacggacaataccggcaggatgttctgattgaaaacggcctgatctcacaggttgcaccggatattgcaccggagacagatgaccgcgttattgatgcacagggatgttatgtttttccgggcggtattgatgttcatacccattttaatattgatgtcggccttgcccgcagctgtgatgatttttacaccggcacgcgtgcggcagcctgcggcggtaccaccaccattatcgatcatatgggatttggtccggcgggttgttcactgcaccaccagcttgagaattatcaccgctacgccaaaggacgcgccgttatcgattacagttttcacggcgtgatccagcatatcaacgacgatattttaaatgaaattccgctgatggtggcggacgggatcagcagcttcaaactctatctgacttatcagtacaagctcgatgatccggatattttacgtgccctgcaacagcttaaccacgccggggcgctgaccaccgtgcatccggaaaatgatgcggtgatagcacagcgcaaagcggagtttgtgaagaaaggacaaacctcaccgattttccatgccctgagccgtcctgcggaatgtgaggcggaagcgataggccggatgatcaatctggcgcatatctgcggcaatgcgccgctctatatcgttcacctttccaacggattgggtctcgattatctgaagagggcaaacccccgcccccagccggtctggatagaaacctgtccgcagtatctgttccttgatgagcgctgttatgagcgcgatgacggcctgaaatttattctcagcccgccgctgcgtaaccgccgggaagccgatgctctgtggctgggtattgatgacggcgcgattgatgtggtcgccaccgatcactgcaccttcccgtatcagcagcgtctggcgctgtccggcgggaatttcacccgctgtccgaacggcctgccgggtgttgagaaccgtatgttactgctgttttctgcaggcgtgatgcagggacggatttcaccggaacactttgtttccctgaccagtgcaatgccggcaaaactgtttggtatctggccggagaaaggcgtgatccgcccgggcgcagacggtgatatcaccattatcgacccggcgcaggaaaccactatccgccatgcggatctgcatgataacgcggactacagcccgtacgaaggcatgacggtacagggcgcagtccgctgcacactgtcgcgcggtgatattgtttaccgtgacagcgaatttactgctgaacccggccgcggccgtttcctgaaacgccgtccgtttaaggctccgcaccggtgttattaattttttccgattatcgtttcaactaattcattacgggtaaaaaaggatgaaaaaaacaatcgtattagcactgggcggcaacgcactgggaaatgatcttccgggacagatggctgccgtcaaaaccacctctgtcgtgattgccgacctgattgctcagggataccgcgttgtggtcacacacggcaacggcccgcaggtggggatgataaccggcgcatttgaggctgccagcaaaaccgaagccaaatcaccggttctgccgatgtcagtctgtgtggcactgagccagggatatatcggttacgatttgcagaacgcactgcgtgaagagctgctgaaccggggcatcaacaagccggttgccactatcgtgacacaggtggaagtggatgcggcggatccgtcatttaaaaacccgaccaaacctatcggcgcgttctacagcaaagaagaagcggaagccctgagcaaaaaagggtttgagatgcgcgaagatgcgggccgtggttaccgccgcgtggtctcatcaccgaaaccggttgatattattgaaaaagaaaccgtcaaagccatgctggatgctgatcagctggtgatcactgtcggcggcggcggtattccggtgatccgcgacggcaacaccctgcgcggggccaatgcggttatcgacaaagactgggcgagcgccaaactggcggagatgatcgatgcggatatgctgattatcctgaccgccgtggaaaaaattgccatcaacttcggcaaaccaaacgagcagtggctggacaaactgacatctgcggatgcacagcgttatatcgatgaaaaacattttgcaccgggctccatgttgccgaaagtggaagccgcgctctccttcagccgcagtaaaaaaggccgcaaggcactgattacgctgctgaataaagccaaagacggtattgagggtaaaaccggtactgttatcggcgattaatcttccttttgttaatataacggccgggcttcccggccgtttttctgctgcgataattataaaccgctgattggtttttctttcggatatttcagtgtgtaactcagcggcagttccattacctgctgcggcttcagctccactttccattccacttcaccggtctgtttattaacggtcccttctccggttttaatatctttcaccaggatattggtatcctgactgaccgggatctgatcaaacaccgttaccaccagcggcgctttggcgaaagatgacagggtaatcatatagccttcgctctgttcaaccgcagagcccagaatacccggctgttttgtcagcttactgtccaccttacggctgacctgaatatctttattcatgccgaacggcagttccagctcattggtgatcaggccggaatcgatataggtctgcccgatataacggttatcaaaatagatattcgccttaccgctgagcagattcagcgccggtgcattttccacaacagcctgtaaatacacatgctcatccatcttcggccgtgtgatataacggtattttccgtccagcgccgtctgtttgatggtcagggaacgggattccggaactgacggcagggaatacggtttatcaatactgtacgtcaggctgataccgttactctctgcggtaacaaacgacgagatcccgccggcaggggcttgtttcgctgagcggttgcggctgtactccttcttgtcctccgccatcatagccaccggagccggtgccagatcacccatcacagcatactcattgtacagtgacagatactgcggatagagctgcggcggggcaatactctgtaccggatcggcggatgacagcaccagctccacctgatcccagtcgataccggtgttctggatcacatccgctttgtaggtcagcgtcaccggcttatccataccggcgctgcggatatcataggacggcgcccaggccgcatccggcgtgatatagtcgatatccagttccgctgtcaccgcttttttcgcggacacattcagcaccagctgtgtgcggcgctccttaaactgtgtgactttctcttcatactgcgctttcagcagtgccagtgcctcggttttttctttgatttgccgggaatattccagctgctccgcatagatttttgccatctgagtgcggataaaatccagcttctgcacggattgctcctgtgtcagcggcgcaccgccggtgccgaagaaatcctgatcacgcagcagacccagctgctcgttattcacttctgtctgcatattcagctgctgaatcgccagatcctgctcctcaatctgcgccttcatggcattgatttcgtctgaatacaccggcttttcaatttcgctgcgcagattgacggactgaatgatgacatcattattattcagcataacggataagctgccgggattaatatttccggccacattagtcaggatcacatcactgtcaccggcaggcagattcagtgttgcgctgttactcagctctgccccgcgcaggaaaatcgtggctttgttaagttttacatcctgaacaattacattcggtttgcctgccgccgcggctgttaccgccataccggcgatcagcaggg

SEQ ID NO: 74 - DNA, 72532 bp, unknown
  Altogen 322075 strain
aggtgttttgagttgagagacgaaagaatttttcagatgatggagaggaagcgaaagcagaagctcttcatgataaagcttgttttggattaaatgaatttgcctggcggccgtagcgcggtggtcccacctgaccccatgccgaactcagaagtgaaccgccgtagcgccgatggtagtggggggtccccccatgtgagagtagggaaccgccaggttattattaagtgaagaagccactctttgggtggcttttttgcgtttgggcgaaaagaaaaattatttttcacctgaatacgtgttctgaaccggatagcatgaatcaaagtttgctaagatagtgacggacagaagcaaacagtatcggggttatcgttgaaagagaaaaaaaactggtccgtccggtatgtcgcagggcatccggcacgacaaatcccccccatgtcggcagacatgctgggtaacggattaccggttggcttaccattatccgcaccggaacaaactatccgcgttgtggtctggaacatctataagcaacagcgtcctgactggcgcaaaacccttgatcgcattttgcatgacacgcaactggttctgcttcaggaagcacagccttctcctgaactggtcagcctggccggaaaacaccagcttgttgctgatcaggttcccgcgctgcattttcagcagcatccttccggtgtgatgacactggcaacctctcacccaatctattgctgcccgttacagcagaaagaacccttattgcgtctgcctaaatccgcattagttactgtgtacccgttgccggatggccgtcaactgatggtgattaacgtccatgctattaatttcagttttggtgtggatgtttaccggcgccagctgaatacggtcggctctcagatccgctgtcatatcgggccggtgatcctcggcggtgattttaacgcctggagcaggcagcgcatgaatgccctgaaacgttttgcccgtgctcagggactgaaagaagtgctgtttccggatgacatccggacaaaagcatttggtcacccgctggattatctgttttatcgcggatttaaattggttttatcggacgttatgcagacagatgcttcggatcaccatcctttaattgctgagtttatgtaaaaatgtctaatggtattgtttatcactgttatcattaagtaataatattaatgcaatattatttatattaactatagttatctggttgttattacctggtgttattcgttattaactaattaagtaataaaaccggagactctatgcagcgtattgttattgttggcggcggcgccggcggcacgatggtcgcaaatattctgaccagaaagctgttaaatgatatttatcagaagaaagtggaagttgttcttatttcagacagtgaatggcactattataaacctgcgtttatgtatgtggcttttaatctgtatctgaaagaggaattacggaagtcacaacgctctctgcttcgccccgaaattcagtttattcatgatcgtgtcgagcattttgattttgcatcacagacgctgcagggaaaaagcggcaccaaatacggatatgactatctggtgatcgccaccggctgtcagccgagaccggatcgaatctccggaatgaaagaagccgccgaccatttctatcagtatcaacccgcccgtcagctggcggaaaaactggcaaaattcgaaaaaggccggatttttattacagtttctttcccgaataccccgaatgttcctcaccagtgtggtatcgcaccgatggaaaccacgctgatgctggatgattatttccgtcagcgtcgtgtccgccaggatatcgaaatcgtttatacctatccgacagtatctcagttattacgtaactgcctgtttatgcagaaagatgtttgtgaagttctgccggcggtctttcaggaacgaaatattcaggctcagcgcggttttaccctggagcgtgtctgccctgaaaagaaaattgcgtattccaaagaaggggaagaacagccgtttgatctgctgataggtacgccgccgatttctgcggtggaatcggtacgcaataccggattatccgacggcgacccggaagagggctggctgccgacagatccggaaacgttgcaggtgtacggactgaaaaacgtgtatgtcctcggggatactgtggatctgcctatcagtaaagcggcgggcagctgccataaccagtcaactgtcgtggtggataatattattggcgagatgcgtttcggctataccaccgccatttatgacggacgggttcaggcagtcgcgcagatggggctgaatgcagggatgccgcttcagtatgattataagcatgatgtgttaccgacaccggcgacaaagctgggtggcctgctgcgtaccggttttaaccgcgggctgtactggtcaaccgttcgcggcctggtataacagaggaaactgcaatgtctgcaacagaacagatgaatgaacagactgctgcgccgcagcctgaattgtccgcacaaacagcggaaaaactggcggtattaatgcagctgaaccgctttgataatgtgattgatttgttgtctctggtctcggatctggttgatattatcggcaagaatgaggtcaataaactggcggataatgcggaatcaggtatcgcattattgtgggaaagcgggctggcgctgaacaaggccaaaatggaaatgatgtacagtgatgaaaagtacaatttccgcaatacctataaattactgaaagatcaggacacgctcaaaggcatcaatatggtgctcagaacgttacagattatgggctcccgtattcagcgtatcgacagcgaaccctgataccggacataaaaaaaccgggtgtattattcacccggtttcgtgttttcagaacagtgagctgtctgtttatacccgttttttcacaccggcaaaataaccgacagtcagaattaccacccaggcaatccccaccatcagtgccacacgtgtatccgggaagtaacccagaagggcgatcacaaagaccataaaggcgatggtcagagcgggcgcaaccggccacatcggtacagggaatttcagggttttgacctcttccggtttcatctgacggcgcattgccacctgagataacagaatcatcagccagacccagacggtcgcgaaggttgcgatagaggcgataatgatgaagattttttccgggatcaggtagttaagcactacgccgaccagcagaaccgcactcatcaccagaactgtcatccacggcacaccgtttttggtgagcttcataaaggattttggtgcctgaccttcctgcgccatgccgtacatcatccggcctgcaccgaagatatcactgttaatggcagaaacggctgcggtgatcaccacgaggttcagaatattagccgcgtaggagatattcagtttctcgaaaatctgcacaaacgggctgccgttatggccgatctggttccacgggaagatacacatcaggataaacagtgtcagcacatagaacagcagaatacgcagcggtactgcgttgatcgctttcggaatcgttttttccgggttctgtgcttcactggcagtgataccgataacttcaatgccgccgaaggcaaacatcacaatggccagtgaggctatcaccccgcttattccgttcggcataaagccgccgaattcccataagttactgataccggtcggatgtgcggtttcctggccgaagccgaacagcataatcgccgcgccgccgacaatcatggcgataatcgcggtcactttgacaatcgagagccagaactccatctccccgaatatcttaacgtgacataaattcagcgcgccaatgaaacacacaatccccagcacccagatccactgatcgacatccgggaaccagagcttcatatagaagccgaaggcggtgacgtccgcgagacagacaatcagcatctcaaaaacatagttccagccggtgagaaacccggcgagcggccccatataatggctggcatattgtgaaaatgaacccggtaccggatggtggactgccatttcgcccagcgcacgcatcaccataaagactgccgcacccccgataaggtaggccagcagaacagcaggacccgcctgctcaatagaggccgccgagccgtaaaacaggccggtgcctatcgccgatccgagagccatgaagcggatgtgccgccctgtaagcccccgtcgtagcgccgtattattttctttcatgtaattaatcctgtcgctgtcatgattagcagcgtttttactgatgtgaaacgcggtcagagtcaacccggtactttaacataaagagtcatgctgacgggataattatctgcaataatacggccttaaacgtaaggaacagatgagtgatgcaataccctattaacgaaatctttcagacattgcagggcgaaggggtttttaccggcgttccggcgatttttgtccgtttgcagcgctgtccggtcgggtgcagctggtgtgataccaaacatacctgggaacagttaccggaaaaagcctgctcagcagaagacatgatgaacaaaacagaggaggacgaacgctgggcctctctggatgcagacagcattattatgcagtttgaggcgaaaggttatacagcccggcacgtggtgatcaccggcggtgaaccgtgtttatatgatttgcggccgctgacggcggtgctcgaagcgcggggttatcagtgccagattgaaaccagcggcacacaaccggtgcagtgcagtgagaagacctgggtgaccgtatccccgaaagtaaatatgcgcggcggttatgatgtgctgacaccttcactgttgcgggctgatgaggtgaaacacccggtcggacggcagcgggatattgatgaactggatttactgctggcgaaattgccgggggataaacagccggtggtggcgttgcagccgatcagtcagaaaccggctgccactgctctctgtattgagacctgcatcgcgcgtaactggcgtttctcgatgcagactcataaatatcttaatattgcctgattattcaccgcggtaaatacagccggcggtacaggtctctttgaccagcacggcactcagcatcggcagcagcggtttggtctgctgccagatccactctgcgagtacttcactggtcgggttttccagccccggaatctcattgagatagtgatgatccagacggtcataaattggtttaaatgcctgtttgacctcagcaaagtcgatcagccagccggtatgtgcatccacctcaccactcagctccagacggacaagaaaggaatgcccgtgcagacgcccgcatttatggccttccgggacatgcggcaggcggtgggcggcttcgaactggaactctttaaaaatcgtggtgctcataactctctccggataatgacgggatggcgtaataaaagcgtcattttacgcaatattcagtgaaaatgttaccaaaaaacagcaaagtggcgaataaataacagaaatgccctgctatttttcatcgacaaaaccggtacttttctctatgttggaacgtcagaataataacgaatacactcatttaccgggtttactatgacatcgccgatcacaacctctccgctctccgtgcccgactggcagcacctgcaacccttacttgacagactgactccgcaacagctgaactggttatcggcctggtgccgtgaacgggcagcggcagcgccgtctgcggcggaacgggaaccggcggatattctgctgatcgctgcgtcccagaccggtaacgcccggcgtgtggcagaatccctgcgggatcagttgttcagtgcgcagcgggcggtgcgtctggtgaatgccggtgacctctcactgactgaatttccggaatcaccgctggtggtgcttgtctgtgccaccaccggggatggtgatgcgccggaagaagccctgccgctgtttcatttccttcattctgttcaggcgccttcgctgacgaaaatccgttacgcggtgctggcactgggtaaccgggcgtatccgcagttttgtcaggcaggaaagaattttgataaccgcctgcatgccctcggggcgcagcggatcctgccgcgtgcggaagcagacagtgattatcaggccactgcagataactggatctcccagttactccctgagctgctgaccctgacaccgccggcagatgcggagaggctcagccgtctcactcacaatacggtagtacagattgattcacagccgcatcagcgtgataaaccacagtctgcggttctgcgccgcgctgtgcgcctgaccgcaccggaatcggaaaaacatgtctgtcagattgtgctggatatccgcggcaccgggttacagtatcagaccggtgatgcgctgggtgtgtatccggaaaacagcccggagctggtcagtgagctgctgggactgctctggtttgacggtactgagcgtgtcacgctgaaaggaaaatcgtattctctgcgtgacgccctgacgacgcagtgtgagctgaccatcaacagtgcaccggttgtggcggcttacgcccgcctcagtaacgcgccggaactgctggatatgattgcggatccgcagcagctgatatcgtacgcacagcgcagaccggtgacggatatggttcgtgagtttgccgtgcagacctccgcacaggcctgggtggattgcctgccgccgctgatgccgcgtttgtactccatttcctcgtcgccgctggtctcaccggatgaagtgcatctgaccgccggggtggtggagttccggactgacgggcgcacccgctacggtgcggcaacccgttacctgacgcatcagttacagcccggggatacggtggcctgttttgtggaacacaatgaccacttccgcctgccggatgacccggaaaaaccggtgattatgatagggccgggtaccggcattgcgccgttccgtgcgtttcttcagcagcgtgcggctcagcaatccggcggaaaaaactggctgattaccggcaatccgcatgaaaaaagcgattttctgtatgagacagagctgacagattttgtgcgtcagggcgtactgacggagctgacaaccgcctggtcgcgggatcagccgcagaagatttatgtgcaggataagctgtctgaaatgcgggaaaccgtctggcgctggctggagcagggtgcgtacgtatatgtgtgcggggatgctttccggatggcaaaagacacggatgccgcattactggatattatccgcagtgaaggggcgatgtccgcagaagaggcactggtttttctgaacggattacggacagcaaaacgttatcagcgggatgtttactgatcttctgtccgaataacggacggaacagtagcatctgcgccgatcttatgggaagattagccgatcttttcgggggcggtgatgggcaaactgacgctattacttttagttattctgggctggctgcaatattcattgtggttagggaaaaacggtattcacgactatgtacaggtcagtgaagatgttgctgcatcagaacaggtaaatgcgaagctcaaagcccgtaacgaacagctgtttgctgagatcggcgatctgaatgacgggcttgaggccatcgaagagcgcgggcgcagtgaattaggtatgatcaagcccggcgaaagcttttaccgggtcctgtccgaaaaacggacacagcagaacgcgcagtcacaaagtcgcagtaactaatctctatgacaatactttcttccgcaatgaccggcgcacaaccggcaccggatctgtccggtatttctgatgatgctccggtctcggcgctgatcccggccgccggaatcggtacccgcatgcagtgcgaatgccccaagcaatacctgattattgccggaaaaaccattctggaacataccctcgctattttgctggaacacccgcgcatcacacaggtggtcgtggcgctgcatccgcaggatacagttttcagtacattaccggtcgcacggcatccgcggatccgcactgtcaccggcggtggtgagcgcgcggattctgtcctggccggtctcgattatcttgctgagcatactccggaaaacagctgggtgctggtacatgacgctgcgcgtccctgtttacagctgacggatctgaaccggctgctggccgtgatgtcagacacacaagccggtaaccgtgtgcagggggcgattctggcctcaccggtacgcgataccatgaagcggggtgtggcatctgccgggtataccggtattgatcacactgttgagcgcacacagttgtggcacgccctgaccccgcaatttttcccgcttcatctgctgcgcacctgtctgcagcaggcactgtctcagcaggcggtgatcactgatgaagcctccgcgctggagttttgcggctatcagccgttgctggtgcccggccgcgcggacaatattaaagtcacacagccggaagatctcgcacttgccgggttctacctgtccaataacaataaggaacagacaacatgatgagaatcggacacggttttgatgttcatgccttcggcggcgaaggcccgattgtgattgcgggcgtccgcattccttacgaacagggattactggcgcattccgacggtgatgtcgccctgcatgcggccaccgatgcattgctgggtgcggcggcgctgggggatatcggcaaattattccccgatcctgttcctgcctataaaggcgcggacagccgtgtgctgctgcgtgaggcattccgccgtattcaggaaaaaggctacagactgggcaacctggatgtcactattatcgcccaggcaccgaaaatgctgccgcatatcccgcagatgcgggtgaatctggcggaagatttgcagtgtcatatggatgatatcaatgtgaaagccaccaccaccgagaaactcggtttcaccggccgcaaagaagggatcgcctgtgaggcggtggcgctgcttgtgaaggctgaagcatgagtctcccggtcagttatttccacggtaaaccggcggccaccggggtgctgaaagcacagccggaagattttctggtgcaggaagatttggggtttgaacctgacggtgacggcgaacatgtgatggtccgtatccgcaaaaccggctgtaacacgcggtttgtggcggaagaactggctaaatttgcgaaaatcgccgcccgtgctgtcagctacgccggactgaaagatcgccatgcggtcaccgaacagtggttctgcctgcagatgccgggaaaagagacaccggatttcgcgcagatgcagcttgaaggctgcgaagtcctggcggttaaccgccagaaacgcaaattgcggatcggcgcgctgaaaggcaatcagtttactattgtgctgcgccggatcagcgatcgcgccgcgacagaacagcgtctgcagcagattgcacagtccggggtaccgaattatttcggtgagcagcgtttcgggcgcaacggccagaatctgtatttcgcacagcgctgggctgacggcgaaatcagtgtgaaagatcgcagcaaacgcggtttttatctctctgcagcccgcagtgcgatgtttaacgcggtggcggacgcccgtctgacgcagcagcttcaggcaaccgcattgcagggtgatgcggtacagctcgccgggcgcggcagctggtttacggttcaggcggatgaactggcggatgtgcagcagcgtctggataaccgtgaactgcgcattacagcgccgttaccgggcaagggcgatttgggctctcaggatgcggcactggcttttgaaacagaacagctggcaccgtggcaatcactgtggcaactggcggaaaaagagggggcggataatacccgccgtgcgctgatgttgtatccggagcatttcgcatctgaatggatggatgatgaaaccgtccgtttatccttcttcctgccggccggcagttttgccaccagtgttatccgtgaaattatcgagctggaagcggatcaggcggcggaattcagtgaataatcaactgactgattaacataaaaaaggggcggaaattattccgccccttttttcgttctgttttttattcaggttttgctgcagcggctttgtctgtttccgccagtaattcagtcagatacactttggcatccaccggatctttgcccggcagttttacctgatatggcttaccgctgatggaggagccggatgccaccttatccacaaactgctctgcggtatccagacgtttcttcgttttacttaatttcaggcgcagatgcgattccgcctcggcggcattatgctcactgccgttacggataaaaatcagctgttcctgcttcccgatggcggtcagcatgttttccactctggtctcttcctgaggtgacagcgcgaatgcctctgataccagaagcagtccggcagtcagtgcggtgaacagggtagctgtgattcgtttacagatagccatgcagaaatcctttcagtcataaataatagaagtatcatgcagctgaatatgaaaaaagcaatcagactaaatctgttataacccttttttatcgcggctaacttgataaaatagttttctgtcgtgataaacgagctgttactgataaaaaaggataccgttgtgctgcgaattctggtgagtaatgatgacggcgtcagtgcgccggggatccggacattgtctgaggcgctgcggcgtacttaccatgtgcaggtggttgcacctgatcgcaaccgcagcggggcatccaacgcgctgacactcgaccgcccgctgcgcacggtagtgcatgagaacggcgatattgcgctggtggaaggcacgccgacggattgtgtctatatcggtgctaatctgctgatgcgcccgcgtccggaaattgtggtttccgggattaactgcggcccgaacctcggggatgatgtgatctactccggtacggttgcggcggcaatggaagggcgtcatctgggattaccggcgattgcggtctccctgaacggcgaaacccattatgatacggcggcggaaattacctgccgtctgctgaccatgctgcagcaggtgccgttacgggccggtaatattctgaacgtgaatgtgccggatgttccgctcagtgagatcaaaggaatgaaagtgacccgctgcggaacgcgccgtgcgccggatgtggtctacacacagatggatccgaaagggaatccgctgtactggctcggtcctccgggggaaaaactggacaccgggccggataccgatttcgcggcggtggatgcaggttatgtctctgtcacgccgctgcatgttgatctgaccgcctacagcgtgcaggaaaaattagaagactggttacaaaaagcaggggtgatacaggaatgatccgccgggtggtacaggatctgattacacagttacgtcaggccgggatccgcgatgaacgtctgttacaggcgatggcggctgtcccgcgggagaattttgtcgatgaggcgctgacacacaaagcttacgacaacaccgcactgccgatcggctacgggcagactatctcccagccgtttatggtggcgaaaatgacagaactgctggacccggctccgcaggcgcatgtgctggaaatcggcaccggctccggctatcagacggcgatcctcgcacaccttgcggcgcatgtttactctgttgagcgggtcaaaggattacagtggcatgccaaacgccgctttaaacagcttgatctgcataatatttccacccgtcatggtgacggctgggaaggctggccgtcccgtggtccgtttgacggctttattgtccccgccgccgccagtgatatcccgccggcgctgctcagtcagctggcggataacggccggatggtgataccggtgggggaacagcagcagatgctcaaactgatccgccgccgtggcaatgattttcatacccaatcgatcggaacagtccggtttgttcccctgattcacggcgatctgggataaaaatggctattttggtaacaagactttttcatttcgcttagtatctgttttaataatacaatcctgccatgtggcctgcggccgcgtggtgactttctgattgtcagttttcgcactatttccagtttcgggagaaggaatatgaactcaagaaaccctatgaaaacaatacgatgggttgcaattgggtcactgatgagcacggttctggccggatgctcaacgccgtatcatgccgcaccaatcagcagtgtggacgaaagcagcagtgcaccggtaatgacagcaggcaatgataacaacagtacatctgtgtccacaccgatgccggtacgtcctcagctcagttctgccaataacacacagccggtcagccggagtgtgcagcagccgcgctctgctaatgtgcagaccagcagcgatggccggattcagtacaaccgtaattatgatgcgatcccgaaaggcagttacagcggaaatacctatacggttcagcgcggtgatacattattttacatcgcttatatctccggatctgacttccgcgaactggcatcacagaacaatattcctgagccgtacagcctgaacgaagggcaggtgattcggttaagcaacggtggcggcaacaatgttgcaccggtcagcagcggcactcaggtcgcaacaaataggaatactccgcaaaacggggtggttgattctcaaccaactaatgcgtattctgaatctgcaggcgctaaaccggccggcggtaagatgctctcatctcagatcaccgcacaggcaaaagcgaataacggcactgccgccaccacagcggcaacaaccgcagccgttaccgcaccggcaacaacaaccagcgcgcctgtcgccgtaaatagtggttcctttaaatggggctggccagcggaaggcaaagtcatttccaactacacaggacctaccagcggtaaccggggtattgatatcggtggtacacgtggacagcctgtttttgcttcagcgccgggtaaagtggtgtataccggtaatgcgttacgcggctacggtaatctggtcatcatcaagcacaatgatgatttcctgacagcctacgcgcataacgattccatcctggttaaagatcagcaggacgtcgcagctggtcagaaaattgccacgatgggcagcagcggaaccacatctgtaagattacactttgaaattcgttacaagggaaaatcagtcaacccgctgcagtacttaccgcagcgataaacggcagaacagcttgttctgcctgaattatcggggtaggagcaagctgatgagccgtaatccactgaacgctaacgagttatacgacgaagattttgccgctgagcaggctgaagatgaagagctgtttgatgagaaacagctggcagaggagagcgaatctgacgatcccggcccggacattgagttcgtgcagagtgtcagccagcgtgttctggatgctactcagctttatcttggtgagataggtttttcaccgctgctcagcgcagaagaagaagtcttttttgcacggcgcgccctgcggggtgataccgcagcgcgccagcgtatgattgaaagtaacctccgtctggtggttaaaatctcccgccgctacagtaatcgcgggctggcgctgcttgatctgatcgaagagggtaacctcgggctgatccgcgcggtggagaaatttgatccggagaaaggcttccgtttttctacctatgcaacatggtggatccgccagactattgaacgggctatcatgaaccagacccgcaccatccgtctccctatccatattgtcaaagaactgaatgtctatctgcgcaccgcccgtgagctggcacaaaagctggatcatgagccgacagcggaagaaattgccgaacagctggataaaccggtggatgatgtcagccgtatgctgcgtctgaatgagcgcatcacctcagtggatgtcccggtgggtgcggattcagataaagcactgctggatattctgtctgacgaaaatgatgtcacaccggaaaaccggctgcaggataacaacatgcagcagagcattgtgaaatggctgtatgagctgaatccgaagcagcgggaagtgctggcgcgtcgttttggtttgctgggctatgaggcggagacactggaagatgtcggacgcgagattggtttaacccgtgaacgtgtgcggcagattcaggtggaaggtttacgccgcctgaaagatatcctgcacaaccacggattgtgtgagaactcactgtttaactgagtgatccgtaaaacagcgttctcagagcagttataaaaattattcatgcaaaagggggggaatttattcccccccttttcttttgtccggctgtcagagcatctctttcaggcggtagagccagtccagtgcctgacgcggtgtcagggaatccggattaatgcccgccagcgcatccagtgccggggccgcttcttccggtgcatccagcaggttcatttgcggtgtttccacatggcttgccgtcgcattcagtgacagcgattccagttcgcgcagtttctgcttcgcgcgtttgatcacatcacgcggcaccccggcgagcagtgcgaccgcaaggccgtaacttttgctggccgcaccatcctgcacgctgtgcataaaggcaatggtgtcgccgtgctcaactgcatccagatggatattggccacgccttccagtttttccggcagcgtggtcagctcgaaatagtgggtggcgaacagcgtcagtgctttgatgcggtttgccaggctttccgcacaggcccaggccagcgataaaccatcataggtggatgtaccgcgcccgatttcatccatcagtaccaggctctgctctgtggcgttatgcaggatattggcggtttcggtcatttccaccataaaggtggagcggccggaagccagatcatccgatgccccgacgcgggtgaaaatccgatccaccgggccgataactgctttttctgccggcacaaaactgccgatatacgcgagcagtgcgataagcgcagtctgccgcatataggtacttttaccgcccatgttcgggccggtaatgatcagcaggcggcgctgtggtgacatcgtcagcgggttagcgataaacggctcggtcagcacatgttcgacaaccgggtgacgaccgccggtgatctgaataccgactttatccgtcagttgcgggcaggtgtaattgagggtttcagcgcgctcggccaggttggtgagcacatccagttccgcgagagtgtccgaactgagctgcagggcttccaggtgcggaagcagcagatcaaataactcatcataaagggctttttcaatcgccagcgctttgctcttggaggtcagaactttatcttcatactctttcagttccgggatgatgtagcgctcggcgtttttcagggtctggcggcggacgtaatggatcggcaccaggtggctttgtccgcggctgacctgaatatagtaaccgtggacaccattaaacccgactttcagtgtatcgataccgagtttttcccgctcgcggatttccagtttgtcgagataatcactggcaccgtccgccagcgcacgccactcatccagctcttcattgtagcccggggcaattacaccgccgtcacgcaccagtaccggcggcgcttcaacaacggcccgctccagcagagcctgtaattcatcaaattgtccgatacgctgttgcagtgtctgaatatacggatcagataccgcactcagctgtgcctgaatatccggatactgtgaaaaagcatggcgcatccgcgccaggtcgcgcggacgggcggtacgcagtgccagacgtgccagcacccgttccagatcgccaatctgacgcagaaccggctgtaaatccgggctgatttccatcagcgcggcaatggcctgctggcggttggagagcacagctctgtcacgcagcggggagtgcagccagcgcttgagcatccggctgcccatcggggttacacacagatccagtacggacgacagggtattttcggtgccgccgctgaggttctgggtaatttccagattgcggcgcgtggctgcatccagaatcacattttcctgcagattttccagggtcacactgcggatatgcggcagcgaggtgcgctgggtatctttgacatattgcagcagacatccggcggcctgtaaggccagcggggcattttccacgccgaagccgtgcaaatcccgggtgccgaactgtaatgtcagctgctgacgggcagtttcgagctcaaattcccacaacggacggcggcgcagccctttctgattctgaataatggcgaaatctgccatatcttccgggtagagcagctctgccgggcgggtacgctgtaattccgcggccatcgcatctttatcgtctaactggaggatacggaaacggccggatgtgatatccagagtggcgtaaccaaagtcgcgcgcatcctgccagacagcggcgagcaggttatcctgacgctcctgtaacagcgcttcatcactgaccgttcccggtgtgacgatgcggatcactttgcgctccaccgggcctttgctggtggccggatcgccgatttgctcacagatggcaacggattccccgagctgaaccagcttcgccagatatccctcaaccgcatggtgcggcacgccggccatcggaatcggctgaccggcggtctggccgcgtttagtcagtgaaatatccagtaactgtgctgcccgtttggcatcatcaaagaacagctcatagaagtcacccatccggtaaaacatcagaatatccggatgctgtgctttgagccggaagtactgctgcatcatgggtgtatgggagtcaaagttttggttgtcagtcataaggattctgttaacatactgaaagagttgcggtttatcaactgtccgccccgggtacagtcttcattaatgctcctaaaataacacagattatgatgaaagaggggattccttcctgcaccgcggtgaattattgaaaagggtggaggaagatcgcaaaaccggggaaaagatgagaaagtcacgcgaaaagccgcgcaatatacgtttacgcggcttcaccattctgtgttgttctgttccctgaacaatcacgtcaggtttgtacaaccagatactgctgagaacttaacgtactttattgaattatacttcaaagattaattgaaatccggattttatccggttaaattcaataagtatttctgaattatttttttattatacttcggtcactttaacagacatcacagtatatttaccatttgcgtcttcaccaccatggtaataatacaggcgtccttcgataaagaagaagttaaagtttttacgatcatcgatagcatattcaaattcaaatgtgctgaccagtccgagtgttgtggttgaataaacttccatgtttttgccggccaagtcaaccgcacaaatataagtggttgcagtaacatcatcatacgctgcctgaataatatcataataacggccaaagtttttactgaggatagtttcgcccagtgtgccgtttttatagacaggtttgatcaggtaatttccgctttcatcttccgccagaagaaaagttttgttgccaacattatagataactgtctgcggatgaatatgacctaactcacctttatcaaccattgttaattttattttacgagccataatattactccttttacattaaatgcactttgatgtggtgcgtttatagttataaggaaatggcatagcatccgcaatattgaaagttaatgatcttattatttaaattattacatctaatataaaatatatattattactatacggggaatattgttttctgtataaattatatcgcctgtgagtatttccctgataataacttttggttactgtgcctgcagataataataacgttacgcacatagcaactattgcttattatcgcacgtaaagtccggaatttatcaaaattagccgttagaattcatcaccatttaattaaacgaaaccggcttatattatgttacgcccgatacttcacactctgattattaccggctcactgagcctgagcactttttcttatgcggatggcccgactctgtcgttaagtgtcagccagtccggcggctctgcacaaaatgacgatggctctccggatgccacccgcccttctgaatccaaatcccgtattctgcctatctggggtgatgaagcccgtgcccggggttatgatcttcccgagccgtttggtgtcggttataactatatgaatctgcggcaggatattgttgtggataaaatcggctttattatgccgacaaaaattgtcgtcggtgaaggctttttaaaaacatcggttgaaggtattaatattgatgccggtcatacccgtgaaaaaacagaaacccatatgctgaagttagactcatgggtatttccgtttatgaatgtgtatggtttatacggaaaaacaaagggtaaatctgacacaacactggccggtggttcggtggatgttaagatgtttggcaaagtacacaatattaatcttgactctaagattgaaggtcagccctttaaactggattttgaagggaaaacctatggtgcgggtgtgacttttgccggtgcctatgagcaattcttcggtacagtggatgttaactataccaaaaccaatcttgatatccttgacggtgatattaaagcattggttgtttcaccccgcatcggttatgaatttgtcttttcaccgttaattgccggtcagggaaataccaaattacaggtctggaccggtgcgatgtatcaggatattacccagcgtttcagaggggatatcagcggattaaacttatcgttaccgggaggcgcggagaatattatccccggcgatatgaaattcgatgttgaacagcatcttgctcataaatggagcaacctggtcggtgcccggttagaagtgacccgcaattttaatataatctcagaagtgggctttaataaccgtaacagtttctttatttccggagaattccgtttttaatgatatttcgttattttgccgccgggttggcatttgccggtctggtggcggttcacacagcaaaggccggttatttaccctcacgggaacaaattgatgatgcactgtccggactgggcagtaataatcagtttgatcgcagcaaaaccatcgactggggggtattacccgggccgttttatacccctgaactggaattgggtgtcggggtggcgctggtcggcatgtatcaggcggacagtgatcctgacagtaaaatatccaccttatccctcagtggttttgcctcctccaccggggctttcgggctgaatctgaataattacacgtatctggataatgataactggcgtttttatctcagcggcacaatcaataatgtaccgacggattactggggaaaagggtatcaggccgggcgtgtcaaagatcatttcggtgaatataagtcacagcaactgcggctgacgccgtcactgctgcgccgtgtggcggataatacctatctcgggttaggctgggatttcagcacactgaatgctgcctcgccggataaaccgttcagccgctatatggatgagcatgactatgaccggcatgcggtcagttccggggtcagcgccaccttcagttatgacagccgggatttcctgccgaatgcccgtcaggggcaggcactggatctgcgttatacctggtatgcgccgtcactcggcagtgatacgcggtttaataccaccgagattcagtacaactattattatccgctggatgataaaacagtgctggcgtttgataactacgcgcggtttgcatccggagatgtaccgtgggatcagtattcccgcctcggtaacgggcggcagatgcgcggctattatgacggacgttatcaggataatcatgtttttgcctcacaggtggagtaccggcgcaagctgaactggcggcacggtattgtgctctgggccggcggcgggacaatgagtgagagtgcacgtcatctcggcggggggcactggctgccgaacgtcggtgtagggtatcgttttgaattcaaaccacggatgaatgtgcggctcgattttggtgtcgggaaacagagcagcggtttttatttccaggtcggggaagccttctgatgcgggtatttatcagcgcaattatcatgatggtactgttatccggctgtcagagccggatggccgatgtgccggttatacgcgccgatctttctccgcagaccacggaagcggcggctcaggcatttccggttgcagatgatgtaagtgcacctgacgggctgcgcccctgctgcgcattcggctatgatttgcaggcaaaactggggccggttccggtgccgttttacagcatcggtaatgtgctgaccgccggtgatctgggggagcatgtctacaatgacagcttctggtttggcgtggcggaggttatcggcctgagtaatgaaaacctcgggatcatctattcccgccacggcggatttattgatatcgcccatgtgcgggataccgccgattacacttattacctgttcacgcaaatctatccgcaccttggtgatgcccggatgctgatactgtcggataaactgtcttcccgccgtattcagttccgccgttttaccccgccgcaggatccggcagagcgctataccctgagtgtgtatctggcggcgcggctcgcgtttcgcctggcggcatggcatgagattgcccagtggtatggctatcactcggttcccggttttccggaggaaatttcggcatttaccccggaagatctctactccaacctgctgggcgcgcgccttgccatcacattgctgttgcaggggcacggcgggtcagtcactgattttaaccgcggaatggagggcattcttccgcaggcgctggcacaactggatgcacagcccgcagccgttacccggcagatgtttgacagtattgacgggctctggtgggataagcgccagcgggtgccggagaagtttctggtgctgcgccgtgattacagtgtgagtgatgaccggctgccgtcacagccagcgcaggaaaccgctgccggattgagactggcactacctcagtactaccggggctggtctctggcggagctggcgtcctttgaactgtggcggacaaacaatcccggaaatctgccggtgaccgcactaccgtttaccgaagcggattttccggcactgacagcacatgcggaggctgaggataaaaaaacagcgccggtgtcagtgcagcgaaatcagtaacagcgggagaacccggccgggcagggattccgacggcgtttccccgatgcggatagccccctggcggatataaaatgcttccgcgttgggatcagcatccaccagaagggcgctgatacactgtgtccgggcggaggaaaccgcccactggtacagtgcgctgcctatcccctgatgcagataatccggatgcacaaagagtttggagagtttcccgttctcttcctggcggttgatggtcagttgcacaacaccggcaattttgccgttgattcgtgcggtcatcagccgcgaacggtcaaaatcagcggaggtaatggtcagttcatcccggcaggtcgccataaaggtttcatcatatccccagtgctgttttgagcgcaggcacaggcgggtcagataatccgcttcatcacgctgaggcggggcgagtaaaaaaacgggtgcttctgtggtcataacgatcaaatccgtgattttgctgagacaaataataatagcagatcaaatgtcaggctgcgtaagccggcggtgtgttatttcaccgcaggcggatgtcattttgtaccggggttatcagcgcggaaaagctgaacggctgattgtgcatctgcccggtgttacagtggcgcagaaagcgcgatgccctgagcggcagcagatcagggcggccgtgacagcccagcgtctgtaactgacccggccagtgtctggctgccagtttcaggtgctctgccgggtcaccggcgatcagattaaaaccgtacggcagccagtgtgccggttcaaattccctctgtaatgtcagcccccagccggagaccgcactgtaaaccggcggccggaaatccggtgccagcacatggcgcagtgtcagctcccgtgccttcaccatctgcagcagacggatatgctgcggcagacggggcagctcatccagcacctgtgacagcgaactgtacagccgttccgccatcatcgggctgtcgagcagaataaagcgcggtgagttgctcacgcccctgaagaacaggcaggtatcccacaggatcagttccggggcaggcaaatccgaaccacagatagccatggcgctgatcttcggcccgttttcggtcaggcggatatgcggcggggtgattttccgccagtggcggatcagggcatcggttccggtcaccaccacggaatcggtattgcgcagcagtgtggtatcgctctgcgccggatctgcaaattcacagatgatattgcctgcacccggctgtccgcacagcatcgtgagccagtcgctgtggttgcgggttctgatacggacggcggtaccggtgatataagcggcgatgatcagctccgccgtggtcagcgggttatagccgttatcaataatcaggacgcgttctgccgcataccattgtgtgccgctgagggcgctttctgcggcggtatcaatggcgcgggtgtccgccagccattgcagacgcatctgacagaatgagtgtgtggccggatcggcggaaaataccggtttccggctgagaatttccgacaggtgatctttgatggccgcaatacgccggctgacagcatctgtcatcatatctcatctccgctgaggccgtcccgcgccgtgatactgccccggtaatacatccagggcagcatgctgccgcaggcgcaaccggtgccctggtcacagacatcggtcgtcagcaggcgctgggcgggcagcggcgtgagcagcggggtattcagctgtaacagaccggttttgcctgcgcccgccggatagccgtcctcactgaccagcatgaagcgggcaaactgcggaatatggaaatgcccttcctggcagctgacataatgcagcgggtgtgccggtgtgctgtagatctcacggagggtgacggacggtgccagcagtgtctgcggcagtttatctgtgatgatccggcggtgactgctctggccgtggctgctcagtatacggatgtcccctttcagggcaaaaggtgccgggctgcgctgtgcgaactgcacggcatgatgtgcggcggcaaagatatacaccggatccggtttctgcgcccactccatcagcactgcccacgccagcacggtattcggctggccatccgcaaacacagcggtgacgcactcttttaccggcgcaaactgtgtcagttcaggaaacagcggagtgtcgtattcattgtgcggataagacgggtacggagaagactgcggtggtgtcagcagcaggaaacgcgccgggcggatgtcggtgagtccgctgagacggagaaccgatgccataacccgtttaatggtttccgcgtgttttgcatctgtgtgcgtggccggacacccgctgcggaacagcgctgcgggaatgaccggtgcgggctctgcgttatccagcagagcataggacggattatagcggcagtgataacgatcagtctgctccatcgctttcagatagcgggtttccgccgacggggtcagcggcgcacagggcgacggattatccgcgaactgctcaatcgcgccggtgtccgcagataccggctgcacaatctccttttgcatcatccccccgtgttatcactgataaaaactgcggggtcagtatataagtattctttatacgataattcttaattcggcaaagaataccctcaggaagatgatgccggtcaatctgttaccagtatccgaggagtttccaccacaggctgccggcgataatccagataaccaggttaacgatgctcatcaccagaccggttttccaccattcaccgagggtggtgtaacccgaaccgaaaataatcggagcggtgccggtgccgtaatgagtcagtgacatcatcagcgaggaggaaaacgccagggtcagcccgagcagcatcggcggtgcgccgagtgccagtccggcggcataaaacgccgcgaacatggcggtgatatgcgcggtggtgctggcaaaaaagtagtgggaatagacatagaacagcaccagcagcagcatcccgccggtccagccgatcccgagatggtcaataccgccgccgaccgtcagcgagacccactttatcagcccgagtttgccgaggaatgatgccatcatcaccagtgcggcaaaccagaccacggtatcccacgcccctttgtttttcagcacatcatcccaactgagcacaccgctgcacaacagggcggcaaggccgataaaggcggcggtggtcgggttcacattatattcactgccaaacagccaaccgggcacaccggcccacaatgccagcagcaggataaaaaccccgagtgtgattttttccggcagagacaccgggccgagttcgcggatccgctcacgggcaaattccggggcatccggggtggcggtgatctccggtttatacagaaaatagatcaccagcggcatggtgatcagcgagatcagcgccggtaaaaacgccgccactgcccacatcgaccagctcagttccgcccctttgccggcctcctgtacaatcagtgtaacaatcagcgggttaggtgcggtggcggtgataaacatcgcggacgtgatagggttggtattgtaattcaccagcgccagatagcgtccgattttcccgctggtgccgtcatcggcttttgaaccgaaactgtcagcgatagagcgcataatcgggtggatgatcccgccgccgcgtgcggtattgctgggggtaaccggtgccagcacggtttcggcgatcgccagggaataagcgatacccagtgttttcttgccgaacagggaaataaaatagtacccgatacgagccccgagcccggttttattcaggctgagggagaccataatagagaccccgataagccagatgagctcattggaaaaaccgctcagggcatccccgagcgcggctttcgcggaaccgggattggtcacgccggtcagggcgacaagggcaatcgccaccatggaaaccgcaccgataggcatcgctttaccaataatcgcggcaattgtgccgacaaacagtgcgagcagatgccaggcattcggatcaacaccatcgggtaccggaacagcaaaccagataatacaggtaataagaacagcaattaaggaaggaacaggtttcagcggagtcagtttattcatagatccgtccgtggtaattgtatttaactgccggagggtgacgtatttatactgagtaataattgtatagtatattacagcaggttaataaccgtgctgcgatttactgaccgtaatcaatattatgtcagatgccggttatttttatgtaacagaaaataaccggcatgaacagggagaaaatggggggaattaaagtaccggaatataataatccacgcacagatgctcaggcggattatccgttatcgcttcggtacgggtatatttttcgatatccagtcccggacggcggcataatccgagttgcggtaacgcgtataaatacacattgaaggtgaaatcccggtaatcacggaataagccgtcaaaatggaattttgcatatttcccgcggttgatcaccgccggtgttaattcgttttcctgcacaataaaggccggatcatccaccccgatatgatagccgatagcaatacattccggttgatccgatgttctgtcataggcggtgcggacataacagtgcggaagttccggtgacaccagacggataaaatcacgccagaatgtcgtgcggatctcttcatgcagatggccgatttcatccagcggtgactggtaatgatagcctttttccataacagggatatcgtccagcataataatgtccggctgcggcagcggcggcatttccagttgtaccggcggttgcagcgttgtcaggtcccagttgggattgcggcggtattctgtcggagtcatattaaagaccgccttaaaacgccgggcaaaagattgctgggaatcaaactgatacttcagcgcgatatcgccgatgttttgtgtggtcagccgtaattcggtggcggctttggtcagacggcggcggcggatatagcctgccagtgtcatatcagtaaaccgtttaaaaatccgctgaaaataccatttggtatagccggaacgttcagccaccacatccagctgcagtgacttatccaggttatgctcaatccacaaaataatgtcttttatcacgctgagataaaaggcattgtcatcctgttctttatcggtgaccggtacggaatcaacgaattccgtgacagtgttatcatgtttaagcataaggatttccgtttgttggcacccaaaaaatactgtgatacgattacatactgatagtatgtaacagggcatttttaccatgaacacactgaccaggcaacaggaaaattcagcacggacgcggcaggcattactgatttcggcacacggactttttattgaaaaaggttatcagtccgtttcgattgatgaaattgcccgtgatgcgcgagtcacaaaaggggcgttttatcaccactttaaaagtaaaagtgacctgttattgcactgctatgaaatgcagctgcaaaagatcagtgctgtcctcggtaatattgaacctctgaccgataaatgggaagagctgcagcttgttgtccgttgttttatgaattatctggaacagcattaccgggaactgattccggttcaggaagtgatgccggtcgccgggtggtatgaatttgaggatattaaccggcgctatatcagcagccgggtggataatattgtcagtcagctgaaagcagagcagacaatcaaagaatatgattcttatctgttatgcagcctgatccacggttttatgatgcatattaccctgaatatcaaaagtctcgcggaattccccggctttaaagatgatttcaccgaaatatataataacttcctgcagactctgaaaaaacaccctgacggaatacgtccgctgacatgacgtcagcgggcggataaaaaccgggtaacagcaggaaccagttccgggtgcagcggcagcgccgggttattgtaactggcgatagccgccgcacaatcagcaggggtcgctttcagaacgtgattcatggttgctatctccgcatactgattatccggtgcggtacggataagccgttctccgttttccggagggatttgacagtcatgacccccctgaatgatcagtcccggaacggtcacttttgccagctcttctgccgggtcatactgcatccattccataaaatagcgctgtaattccggggcaaacagaatattgagagacggcgggacattctccgtggttttctctgctttcagccggtcaatcacatcgttgatataggccagcgcctccggcgggaatggctgggtactcatttgttttttcaggataatatcgatggtatatcccgcaggggaaaccaggataatccctgccggtttatgctgttgtgccatcagggtggcaaataacgcgccttcactgtggccgagcagatacaccggggtgtccggatagcgtttttgcagaaaatcaaaccacgcctgataatcactcagataaccggcaaaggtgatatctgccgggttaacggttgccgcaccggcacccgttccggctttgtcggtccgcagtgtgatataaccggcatcactcagggcatcgcccagcatccgcagattatcggtctgactgcccgggctgttcccgtcacgatccaccgggccggaaccggcaataaacaggatgacacctttcggcgcgctgttttccggcagtgtcagtgtgccgttaaggccgtttatttcagccgggatatttttcccggcaacagccgcctgcaatgaaataaaaataatcagcagggcggtaaaacaatggcgtaaaacagaagtcacggtaatatcctgattaagttaaggcgtgcttttaaatgtcatatgaataattttcagcccgaccagaccgagaataataccggcggttttatcaatccagaaggcacagcgattaaattgctgacgtactgcgggccgggtcagaagatacataatcagactgtcccagattaatacggccatcaccatccagagtgcaataccggttttaaatagtgcggaattatcctgactttccagcacaacagtaaacaggcttaaatagaataataaattcttggggtttaacaggccggaggataagccgaccagaaattcttttttaaacgtactctgcggatgtgtatttttatcttcggctgcctgtgccatcagaaaacggtaatcagattttttggcccgtaatgcctgccatgcgataaagagcaggaatattccgccggacagtttaatcagaatcatcagcgtgacagattgtgcgaggatagcgccggcaccagccagacaaagtacaatatacagtgcattggcagtggcaataccggagacaacaccgaatgccacccgtctgctgttacgcagggtactttttataatcagcagaaaatcaggcccggggcttatcagagcaataaagtgagcgagcgccacagcaaaaaaaatcatcatgatgattatccggcacagaaatgaagtaataaaaaaaacatatcactgaaccggggattgtcatacagaaatattgtcagggtgcacataatgcgcgataacatcgccggatgacgaatagttaaatattaataacgaattaaaataatctgcttttttactgttacgcgggtggtgacggtaataatgcagattggcgataatataaaagaaactgcggaaaaaacacaataacacctgatgatataagtcatcattctgttattctcctgctttacctgattattgtgtttttagccgccggaaattggcggtaatttatcctatgccgggtaaataaggattgataatatcgggactgtgttcagaacaatatgatgagaccgattatgaaaaccgcaataaaactaagtgtattaggttctgccgtattattaatggccgcctgtgacagtctggatccggacagcactaaaaatgaattctggtacagcaacccgactgacaccacactgacctttaaagtggatgacaaagaatacaccaccgaaccgggtactgccgcgaaactgaaattatcaccgggtatgcacagcattgagaatgcgaagggtgagaaacagaattttatggtgtatgacaataacagcggcggtattattaacccggataatcatgtctattatatgttgtctgaggtctatgcggtggaagggcagagcgatcgctttaaaccggctctgtatgatgtcaccattaacggccatgatttacagatgccggtgcgcagcagtaatgccaccctgattgaccacaatctgtttaattgcagttaccctgtcggtacggccttcccggaagaaattaccaccagtaaccgccagtctgtcggcaatattaaaaccaagtgttttgataaagcggaactggtggcctatatcgaatccgattacggcgaaaaattacagccggtggcgtcgggtgatgagctgaaagacagcgtcaatatgaccttcgattacgccattccggagccgcagtttaaagatgcggaaacacagaaacaggcgctgaaattaaccggcctgctgaagcagattaacgaatctgataatccggatattcacgacaagctgaataaagagattcaccagaccaccatggatctggtatccgcgtctgccgagtccgcatcatccaatacggtggcggaaaatgagtattacaacacctttatcacgcagaccggcaatttccgcgccttcggggttctgccgaaataagtgatttttcattcagttccggaaagggccgcattatcacgcggcccttttttattaaaaattttaatgaaaaataatgagttgctggttttatcagcaacaaaaaattaaacaataaagagagggacatcaaataaaaaaggagtatgatttcaggagagccgtatttttcatctgaaaaccggccggtagtataaaaaaacaacatcagggttaatctgatgtaaataacagtttaaaacacactttattacgtaacatctgttacggaatcctttatctgcaacaaagtaatggcggaataatgtacggtccgcccggtaaaataacacatcactatgtcaatagcggtgtattttattgttcattttgttaaaggcagatgtcagttttgttctgaactccctcactttctgcttattattttttctgctgccgtcaggctcagaagaaattaatcagattttttaaagtctccgggggattaagtacatcagcattatggagatagtatgaagtcaagaagtttaacgacctggattgtggctgcgttatttatcggggtgattgtcggctttgcgctgaacaaactggccacacccgggtttaatcagcaatattctgctgatatctcagtggtgacagatattttcctgcgactcattaaaatgattatcgcgccgctgatcctctccacgctggtggtgggtattgcaaaaatgggggatgcgcggacactcggccgggttttctccaagacgttgtttttatttatctgtgcttcttttatttccatcactctcgggctggtgattgttaacctgcttaaaccgggtgcgggaattaactttgtggcaccggcggatacagtggtggacaatgtggcgaccgccgcgttttcggtgaaaaactttatcgcccatctgatcccgaccagtatcgttgatgccatggcccgtaatgagattttgcagatcgttgttttctctatttttatgggaattgctctttccgctatcggtgaaaaaggtaagccgattctgacactgctggagtcggtggtcagcctgatgctgaaactgaccggctatgtcatgctgtttgcgccgctgacggtttttgccgctatttccggtatgatcgccgagcgcgggctggtggtgctgctggaagccggtatttttatgggtgaattctacctgacactggcaacattatggctggtgttaatcggtctggcagttctgatcgtggggcgctgtattctgcggctgaccaaagggatcgctgagccggcgctgctggcatttaccacctccagctctgaagcggcgtttccgggcacactgaagcagctcgagcagttcggtgtctccaataaaatcgccagctttgtactgccgattggctactcctttaacctcgtcggctctatggcgtactgctcttttgcggttatctttatcgcccaggcctgtaatattgagatttccatgggagatcagattacaatgttgctgatcctgatgctgacatccaaaggtatggccggtgtgccgcgtgcctcgctggtggtgattgccgccacactgacacagtttaatatcccggaagccgggttaattctgctgatgggagtcgatccgttcctggatatgggccgctccgcgaccaacgtgatgagtaatgcgatgggcgcggcgattgtcgggcgctgggaaggcgagcattacggggaaggctgtcacggaaaaccgccggtagcggttgttgagatggcagaaccggagccgctgaaaaaagcaggctgaagaacctattctctgtatgaaaaaaaacacaggtaccgattttcacctgtgtttttttatatctgcagtttgtatctcatgacccgcttaacacttttacattttcattattctgtatttccgtattaagatctcatttttattaaaataaactttggttttttattttataaatttaattcaatcatcaaatgtaacgataatatgttattttctcattttgaaatcgttaatttatggtttattactttgtttttaaacggatttaataatgatattaaaatggtgtgatacgtgtctgttccttcatgaaattcaccaacttcttcattttaatcatttgttttcgtgcataataagccaccataatcgggacaggtaattttattttttaaattgtgagtcaataggttcttcatttttctgatttaatacgagtgaatataatgacaaataaaacttttgagtatcaggagccattcccgttatcggaagataaaacggactattatctgctgagcagggagcacgtttccacggcgacatttgaaggccgtgagatgcttaaggttgaacctgaagcgctgacgctgattgcccagcaggccgtgcatgatgcctcctatttcctccgtccggcacatcagaaacaggttgcacagattttaagcgaccctgaagccagcgaaaacgacaaatatgtcgcgctgcaactgctgcgcaatgcggaaatctctgccaaaggggttctgccgaactgtcaggataccggcaccgcgactatcgtggcgaaaaaaggccagcaggtatggaccggcgtcaacgatgcggaatgcttatcccgtggtatttacaacacattccagcgtgaaaacctgcgttattcacagaacgcagcgctggatatgtacacggaagtgaataccggcaccaacttacctgcacagattgatatcctggccaccgaaggcgcggaatatcacttcctgtttatcaataaaggcggtggctctgccaacaaaaccgcgctgtatcaggaaaccaaggccattctggaacatgatcgcctgaaagcattcctgatcgacaaaatgaagtatctcggtaccactgcctgcccgccgtaccatattgcgttctgtatcggcggcacctcaccggaaatgaacctgaaaacggtgaaactggcgtccaccaaatattatgacaatctgccggataccggtaatgagctgggacgtgccttccgcgatcgtgagctggagcaggagctgctggaagccacccgtgagttcggtttcggtgcccagttcggcggtaagtatttcgcccacgatatccgtgtgatccgcctgccgcgtcacggcggttcctgcccgattggtctggcactgtcctgttcgtctgaccgtaacatcaaaggcaagatcaccaaagacgggatctggctggagaaactggaatacaatccggcaagttacattccggaatccatgcgcaaagagaatgaaagcgacatggtcagtatcgacctgaaccggccgatggcggaaatcctcaaagagctgagcaaatatccggtctccacccgtgtctctctcagcggcccgcttatcattgcccgtgatatcgcgcatatgaaactgaaagagcgcctggacagcggacagggattaccgcagtatttcaaagatcatatggtgtactatgcgggtccggcgaaaaaaccggaagacctggtctccggctctctcggcccgaccaccggtaaccggatggatccgtatgtggacttgttccagtcgcagggcggcagtatgctgatgctggcaaaaggaaaccgcagtcaggcggtgaccgattcctgtaaagcacacggcggcttctatctgggcagtatcggcggttctgcggcgattctggctcaggaatatgtgaagagcctggatattctggaataccctgaactgggtatggaagcagtctggaaaatggaagtggaagggctcccggcctttatcctggtggatgacaaagggaataacttcttcgaacaggttcagacgaaaaaatgtgagaaatgcgtggcaggccagcctgcctgagccaacactttccctgaggagtttgcatgagcgacgaacgttatcaacaacggcaacagaaactgaaagagcatgtcgacgggcgcgttgccgcggctcagaagaccggcggagtcctgatggtcttcaccggtaacgggaaagggaaatctactgcggcctttggtaccgcgacccgcgccaccggacacggtatgaaagtgggcgtggtgcagtttatcaaaggccagtgggaatgcggcgagcgcaatgtgctggaaaaactgggggttgaattccatatcatggccaccggttttacctggaacacgcaggacaaagaaggcgataccaaagcggcacaggaagtatggcagttcggcaaagcgatgttacaggatccgtcctatgacctcgtggtgctggatgaactgacgtacatggtgcgctacggctatatcgacctggatgagattatcagctacctgaaaaatcgccctgaaaaccagagcgtgattattaccggccggggatgtcaccgtgatatcactgatctggcagacactgtcagtgaactgcgtccggttaaacacgcgtttgacagcggtattcaggcacagaaaggtatcgactggtaattcactccgtaaatacagtctgttatcacaatcgctccgtttatacggggcgattttttttgccggtacggcagcgctgcgccatgtttttcggaatagactgctggccgcggatgaacataaattgatacctttgcatccgtaaaaatactgagtaaacggaagcagacagaatgaaattaaagacgatctcagcccttgcggtatccgctgttgttctggccggttgccagaatatgaattatgacaccctggcacagtccggcggccagttatttcaggcggccaccttaaccgatgcggatatggtgaaactgacggacggtgcctgcaaagagatggacgcaaaaaataacattgcaccggcctccggaaaatacgcggcacgcatggacaaaatcgccaaatcattaggttccgatgtgaacggcacaaaagtgaattacaaggtctatatgaccaatgaaccgaatgcctgggcgatggcaaacggctgtgtccgtgtttacagcggtctgatggatatcatgaatgataatgaaatcgaaggtgttctggggcatgaattaggacacgtcggcctggggcacacccgcaaagcaatgcaggttgcctatgctgccgtggcggcaaaaacagcggcgggttcggcgggcggtctggcgtctgagctgagtaattctcagtttgccgatatgggtatcaaactggttaatgcgcagttctcacagcgtcaggaaacggaagcggataattattcctatgatctgctgaaaaaacgcggcatttcaacggaaggcctggctaccggatttgaaaagctcgcgaaaatggataaagggcagaacagcatatttgattctcacccgccgaccgcagagcgcgcagagaatatccgcaaccggattgcggcagataaacagtaagtgttcgggataataaaaaaggtggctcagccacctttttttatcaggacaaaatcagttctttttcccgcgatttctcgtggatccagtcactgaatttccgcaggttgagtgatccttttttgtcctctttataggtaagaacaaagcggttaccggtgctcatcggcaggtcgcacgggatcaccagatcgccgttttccagatctttctggatagcaaaacgcggcagcagcgccacaccgagatttgagcggatagcggagatcagcatcgaaagcagatcaaagcgcgggccgacccgggttttcgggttgtgaatgcctgaaagctggaaccagtcactccaggcatcgaggcgggtggtctgatgcagcagagtaaactcttccagcacctggctggtggtgagtttgatactgtcatcccgccacagcatgcggctgcagaccggcaccagctcttcctcaaacagatattcaaaatccggccacggattacagaaatcctcacgcatgattgccgcatcgtatttcaggctggtaaagtccgccggtgtggttaatgcgctaatacttaatgcgatttccggatgtttctcacggaagctctgcaggttcgggatcagccagtgtgtgctgaaggtcggtgttaccgccagctcaaacagctgctgtgatgactgccaggacataatatcctgggtgtctttttccagcttatccagcgtgtcatgcaccagcccgaggtaatgctttccggcatcactgaggaaaatacgtttgcggacgtgatgaaacagcgacacattcagaaattcttccagcgcggcgatctgacggaaaaccgcactctgggtcagtgataactcttccgctgcccgggtgtagctctcatactgcgcaacagcttcgaaggtgatcagtaaatccgttttcgggatcttctttcgcatggcgttttactccctaaaaatataatccattttaccgggtgggggatggcggcagagtgaaaccactcccggcctgatgccccatatgacaatacatgctgcatgcggcattaatgacggacatggctaatgccgcgccgctgccttcacccagccggagatccaaatataaaaaaggtttcagaccgagctgctcaagcgcgatacccgcgcctttctcggcggaaaagtgggacgggatcagatagtcccggatagcaggggccagacggcaggccgcgatggcacaggcgtaagataaaaagccgtcgagcacgacaggaatgccgcagacggcggcacccagaatcacaccggtcatcccggtcagatcatacccgccgactttggcgagcacatcaatggcatccgcaggatccggcttgttcagtgcgatagcctgtctgacgatcgcttctttgtgcgagacgcgatccagcggcagattggcaccgataccgacggtatcatgcggatcaagcccgcacaggacgctgatcatcgcagacgccggggtggtattggcgatccccagttctccggtgccgacaacgcggatcccggcggcaacccgctgttttaccagctctgcactggcaaccagcagatgctctgcatcggaataagacattgccgggcctttggcgatattaccgcagccgcgtgccagtttcagggaaatcatgtcatcgataggatcgcagtcaatgccgatatccaccggcagcacgctggtgccgttgctgcgggcaaccgcgcagacaccggtcagctgtttctggatattgcgggcctggatagccgtgacttcctgcggggtgacggcgacaccttctgcaaatacgccgtgatccgcgcacatcacaataatttctttcggcagattatccggatggtcaatccccggcattccggcaagatgtaccgccagatcttccaggcggccgagactgcgcggcggcttggccaatccgttgatatgctgctctgccgcctgcatggccgcgtgatccagaggcgggatcgcacggatcaggtctttcagtgttgtcattgtttttatgctcacattatatttttataatcaaacaacaggcgtaaaacgtgatcgcccgttaaacacagctaacgtcataaatccgtcgcggcattccgccacactgtaactgtcctgttcacaggggaactgccacatggcctctgcgggcaggcggaaccagcgggtgatgataagcccgagcacgcccttgtgggcgacaatcagccgggttgccggggtttctgatgcttcccggcgcagttcatccgccaccgcctgaaccctggccgcaaactgcgggaacggctcgccgccggtcggcgcggcatgcagccagtcattcatccaggtttcccagtccgccgggtaacgggcggcaatctcactgtaatgcttcatttcccactccccgaagtgcatttcattgaggcgcgggtcgcagtgatagtgatgcgtttccggggcacggatgtattctgctgtctgtcttgcccgctgcaattcactgatcagtatagtatctatctgaatatcccgcagataagcggccacggtggcggcctggcggtggccgtgttccgtcagcggtaaatcggtgctgccgtagaacaaaccctctttgttcccggcggtttccccgtggcggacaagaataaagcggctgatactcatccgattacacccagaacagcgcgagcaggaagataatttccccgcactcttcagcggcaccgagtgtgtccccggtttgtccgccgaggtggtggcggaaataacgccccagcccgtaaataataaaggcggtgataatcagtgcgccgagggctttcatcccgcctgcaaccgtgacaatcaccgcgccggtggcgagagtgatgacaaactggcgcagagtgatacggccgatataaatattgcccataccttccccttcgcgggcgtagcgctggttgtacatcaccagtgacatacaggtgcggcctgcgaccggggcgcaaatcagcaatccggcagcagcggtcagggaaagggaagaggaggcgagaagctcatacgcggcggcggattttgccatcagggcaaaaatcagtgccagacagccatgcgtgccgatgcggctgtcgcgcatgatctccagcattctttcgcgtttgcgggcggagaaaataccgtcacaggtatccgccagaccatcgaggtgaaaaccaccggtgatcaggatcagggccagcacatagcccagcgcggcgatcagcggactgtgcgtcgcctgggcaatccacaccgtcagcagtgttgcaatgatcccggcaatcagcccgaccaccggaaaaaatggtacgccacgtccgtactgctgaaactccgtgccttcactccagcgctgcggcaccggaatgcgggtaataaactggagtgtcgcccacaggtatttcaggttcatttgatctgaactccgatcccggagaccaccagccagacctgttcggcctgacgggcgagtttctgattaatacgtccggcgatatcgacaaaatggcgtgccagccggttttccggtgtgatgctcatccccagttcgttggtgacgatatacaccgggcactcgctctctttgcaggcatcaataatatggtcgatttcgctgttgatgccgatctccagctgcgcgtaatcgagcgtgtccggatccgcgccgcccgaggcgtcataaagcagattggcaatcagcgtggtgatacattccagcatcactccttcgcccggtttgcgttcatagcggatagcatgggcaatgtttttaaaaccttcccacgtacgccagtgctgcgggcgatcggccttatgacgcgccacgcgggcggccatttcatcatccgtcaccactgaagtggcgatatagagcgcactgtgacagcggttatccaccagttcttcagcaaaactgcttttaccgctgcgggcgccgccggtgattaaaatcatgctgttttctccttatgcgcacgcatcaggcggcagatttcatcaatattgaggtgttcccgcatctgctgcgccagaatattaaactgctgttctttatgcagcgcatagtcaaacgtgctctccggcagcggctccagccctttctttttccgcagctgattgagcagcggacgggtgaaattgttgcggtcaaaaataccgtgcagataagagcccatcacactgccgtccgggctgaccgcgccgtcagcatggttgcacggctcgcggtttttctcatgcatctgtgcaaacgggatggcatccgcgccggtttcggatacgcccatgtggatctcgtaaccgctgatcggttcaccctgacaggcagaccagatccccggcagtgcgccgcacacggttccggcggtctgggtggtatttttttccggtgagaagcgggtggtgatatcgagcagccccagtcccggcagatcggataatccggattcgacatcatcatagatatgtttaccgaggatctgatagccgccgcagatcccggcaaccggcgtaccctgtgcatggcgggtgagaatggctttatccattcctttctgacgcagccacagcaggtctccgagggtgtttttactgcccgggataatcagcagatccggttcaccgaccagcagcggctcggattcataacgcaggcggacatccggctgggcggcaagggcattgaagtcggtgaagttggcaatgtgcggcagctgaaccaccacaatatccagcacttcctccgttttaccgtcatatttaccgacctgtaacgccacgccgtcctcatcttccagatcaacatccagccacggcagcacgccgagcaccggaacgttggtcagcgcttcgatttgtttaatgcccggcatcagcagggcgacatcaccgcggaatttattaatgatcacgccgattacccgggcgcgttcgtcgtctgccagcagggcgagtgtgccgtaaatcgaggcgaacacaccaccgcggtcgatatccgcgaccaggatcaccggtgcgtctatcatctccgccatgcccatattcacaatgtcgccgtcgcgcagattgatctctgccgggctgcccgcgccttccagcacaatgatatcgtgctcagaagccagatcgttgtagacatcgcggatcatggctttcagctgtggtttatagaggtgatactccgccgcatccatattttgcgcgactttccccatcagaataacctgggatttgcggtcagaggtcggtttgagcagaaccgggttcatgcgcacatccggttctataccggcagcttccgcctgaaagatctgcgcccggcccatctctttgccgtcacgggtgatccccgagttcagtgccatattctgtgatttgaacggcgcgcagtgatagccgtcctgagaaaaaatccggcagaatccggcaactaatacactttttccgacatcggaagcagtaccctggatcatcagtgaaaatgtcatgccattacctcgtgtgttccggcggcgggagttgtctgctgctgcaattgtgcaaacagcgtctgttcagttttgcacagcggcagtccggtttcgcagtggagtttgaccagccacggctgttccagcccggcggcggtgatcatctctttttgcaggaaaacggactccggcgtgccgtggccgcacacttcgccgtgcgacatcacgtaaataccatcacagacctgataaatcagatcaatgtcatggctggaaatcacaatgtgtttaccggcggcggcaatacgggccagcagatcgatcatctgctgacgtccggcaggatccagcccggccgtcggttcatcgagcagcagataatctgactgcatcaccagcgccccggcgatcgccacgcgttttttctggccgaaactcaggtgctgcaccggtttatcacggaaggcgagcgcatccaccagacgcagagcctcatcggtacggcgtttgatttcatcctcttccaccccgagattacgcagggcgaaggcgatatcactgtccacatcggtatagaaaatctgcatatccggatcctgaaagacggtcaccacatgctgacgcaattccagcagggattttttgtcgtatttcagcggattaccccgccagttcacctgaccgtcctgcggtttcagaataccggacaggttcataaacagggtggattttccgcagccgttagcaccgataatcccggtgacctggtgcgcgccgaaatccattgtcaggtttttcaggatattatcgtcctgatagcggaatgtgagaccgctgaccgataattgcggatgatgattcataggtggaaatctccctgatagagcttcacattcagtgcgacggacatttgctgatagcgcatcatcacgcgggaaaacagcatggtgaccagcatcgccagtgagcggtagccggtgcgcaggttgcggtagccgaagcgcagggattgtgcgtggtaaatggtggcggcttcttccagaaagataaagataaagcgccaggtcagcaggatctgctcgatcagcaccagcggcagacggccgcgtttcatcagtttaatcagctgctcaaacggcatattgagcataaaccagaaggtggcagcgagagccgccatgctgcgccagaaggtctgattggcagttgtcagaccggcgggatcaaggccaacccagtactgaccaatctgaatgccccacagcagagtgtccggtgtgcgggcaaatgagataataatggccaccagacccacagccagaaaactgaacgggatcagcagccatttaagatagcggagcggcgatacccgcagtaaccagcaggtaaacgccgcaatacacagcaataaagccgcctggcctgccggcggcaggctcatggccagaaccatcatcacgacccagaaggcaaacttcatccccgggtcacgctgacgccagcggctttgataactcagcgcatcaaggctttgcatttttccggccgctgcggtagtaaccgagcacgtagaaaatcactgcagtgcccagacagccctgtaatgtaaacagcagactttcgatttcaccactggccggttcgtacagagactcaaaccagggctcataatccggcgcgatagcgaggatctgctgctctgcctgatcgtctgaaccgccgtattcaccgccatgatcgataaagaacgggatgataaaaatcgcaacagtcagaaacagtaaaatcagtgtctttttcatgcccgcacctcgttacccaccaggttacgtttcaccagctgatcataaaccagtaccgtcagcagaccttccgcaatcgcaatcggtacctgagtcagacagaagatacccatgaacttcaggatcgccgcacccatccccatctgcggatccgggaaagcgacaccgagctgcaccgaggtgacaaaataggtggttaaatccgctatcaccgcgacaaggaagacgcagacatccttacgccagcccagtttggtggtgaaacgccagaccagatagccgacaatcggtccgataaccgccatcgacatgccgttggcaccgagggtggtcaggccgccgtgtgccagcagcaatgcctggaacagcagcacgatggagccgagcacggccaccacggatggcccgaacaggatcaccgccagtgccaccccggtaggatgagagcagctgccggtcactgacgggatcttcagcgcggaaagcacaaagataaaggcgccgcacagtgccagcagaactttctggttggcatcttcctgaacaatcgctttaaggcggacaatccccgcgccgaggaacggcaggaaaatcagccaccaggcaatcgcccacatcggcggtaaaaagccttccatgatatgcatggcaaaggcttcctggggtgcaatcatcagcagaatagtgacggcggcaccggttaacgagaactgcgtgagtttctgttgcataacaacctcaccgaattatttccgggttttattaattaataccgttgagaaataaggcagtgtctgttcgtcgtcgatctcatccaggcgccgccagcactgttcagtttccagtgtggcatcggccatcaggatggcatgatcaaacaaatcatggcggcggagcagatcgcgtacctgttgtaaacgaccatagaccttcattaacacaatgcattcatgatgcgtgatcgcatgctccagctcttcgggagatgcggtacatgacatgacagcaaggctctggttttccattgccagcgggacaacggcccgtgaagcgatagccgcaaacgaggtcacgcccggaatcacttccagccatggctgattgccgatacgctccagcagggaaacccaggtactgaacagcatggaatcgcccagggtgataaagccgacttttttaccgtcagccacatcctcctgaatcgctttcgcgacatcatcccagactgcttctttcgcttcctgaggcgctttcatcaggaagtgataggttttcaccgtagttttaccggtgatatacggggcgacaatggtatgtgccaggctcggggcatctttcttaccggccggggcatacaggatatccagctcgctgataatccgtgcgccgcgcactgtgataaggtcactggcaccgggaccggtgccgatagcgtaaagtctgccctgtggtttttctgtttgctgactcatgtgcggatattactccccgttatccattgtctgcgccaggtgttcgacaaacatctgacggatcatattgttctcacccatgccctgtaaccatgcggtagcctcgattccggcctgttccagctgtgttttccaggaatcttcctcatcggaggccatatcattgatggcatggtcaccggcgaccagcatcagcggcatcaggtgtactttgcggacgttttcggctttcagacctttgattatcaggtcgatttccggatagctttccaccgccccgacacgtcccgggaagccgctgttggtcatcatatgatccaggcaggcataagcggagaaggcgtggtgagtcgcgccgtgacccataaagaccacacgctcatcggctttcagttccggcatctggaagtgcagggcatcaatcagctgtgagtaatcctcaaaactgctcagcagcggcttgcccacgcgcagatagcggaaaaacggacggtatttttcaacctggccgacaatcttttcgtattcgtccccgttaatcacatgcagtgactggatagccacatcctcataaccctgctcgtgcagatggcgtaatgcctcttcagggttattgatatgcaggttatcgcgctcttttaatttgcggataatcatgccggaggtgaaggcgcggaaaaaatcacggccggggaacgctgccgcaagctgcttttcacagctttcgatatttttttcacgggtttccgcgtaactggtgccgaaactaatcactaataacgcttttttcatctcataacctcagtaaatcaacagacagaaaaacgggatgtcagatactgctctaccccgcaaagatcctgcaattcagtcacctcaccggacacccgggtctgcgggcgtaccacgacaatgcagggaattcccagcgccagacagggggcgattttttcactgaatccgccctgggtgccggactctttggtgatcaccacatccgtgccgcagtaacggtaaaacgcttcattaaattccgccgaaaacggccctttgagggcaaaaatctggtcaatggtcatcccgtaagattcgcactgcgccagcacttcctgtgtcggcagtacccgtgccagcacggttttgcccggcagccgggcaatataatccgccagctgtttgctgccggtggtcagcaaaatccgctgaccgagtgtcatggcaatctcacaggcgctgtcgatggagtccgttttgtaaatcagcgggttatcaaccgcgtcaatatcactcgggcggttataacgcaccagcggaatgcccagctcacgctgcacctgcaaaatagtgtcgctgagcacggcggcgtaaggatgcgagagatccgccagcaggcggatcccgtgacggcggcagtattccgccatcgcctgtgcatccatccggccttcccggatctcaccctgtaatccggctgcctgctgacggcctgcggcggtggcgaccgagagccggtagcggactccctgtgcatccaggcgctcacagagcagacgggcatcactggtcccgccgaaaatcagcagtctgccgtcattcacagtttgtatccccgtggtgtgatcatcaggtcatcactgatataggtggatttattaccgacaatcaccaggctggtcatatcgacacgctcatattccatctcaccgaaggtggtgatccacttctcttctttcttacgggccgcagctttcaccacgccgatcggggtggtggcggctttgaacggtgccatcagttcaaaggcacgggccagatgaccttcgcggcccaggctgcgcgggttatagaaacagataacaaaatcggcttcggcggcggctttgatgcgtttctcaatcacctcccacggcgtgagcaggtcgctcaggctgatatggcagaagtcgtgcatcagcggggcacccagtaaagacgcggcggcgatactggcggtaatacccggcaccacacgcacctgaatatcgcgcttctctttggtgacgatttcgaggataagcccggccatgccgtaaatcccggcgtcaccgctgcacaccatcgccacgtttttgccttcctgtgcaagctcaatggccagatggcagcgttcgatctctttgcgcatgccggttttgatgacttctttgtcgcccaccagaggtttcaccagatgggtataggttttatacccgacgaccacttccgcttctttcagtgcggtgacggcttcttcggtcatcatggcttcactgccggggccaatgcctataacggttaacatactgtttctgctcctaacgtaatggtgatcccccgggtcttacaggtttgccctatcagacagcctttgctcatcagccaggcgaccggccgggatacactcccgacacccgtggtttttttaacaaattctgattccgggaactgtgccgccacaggggcaagctcctcagcactgaatacggtaaacggcacctgatagcgggcagcgagcgccagcagggcgggctcctgtgctttcagggtaatactgccgatagcgcggacggcttccggcagcagattgttctcagccagctgttcagcaaacagctgctgaacctcatctgccccggtatctctgcggcagcccataccggcaataatccggcgcgggatcagtttatagaccggcaccggcagcataacttcctcgcggcggtaactgacacacaccagcgcatccagttccggcagagtgcgcagatccgccaccgggataagcccgggtaaggcgtatttatcctgctccgccgccatatccggatgccaccagatgccgatacgctccccgctgaccatcatctggttcagggttttgacggtggcgcggaaatcggtgaacgtggcattcatctcctgcgccagcagatcaaaactggtgacctgattgacatcggtggcggtggtgatcaccgcctgaccgccgatccggcccgccagccaggtggccagctcattggcaccgccgagatggccggagagcagactgatcacatgctgtcctttttcatccatcacgatcacggcagggtcactcattttgtcctgaatcaccggtgccagtacccgcacggtaatgccggttgcgccgatgacaatcagagcgtcattctctgcaaatgcctgctgtaaggtggcggcaaagccgtcacggaacggttcaaagccatccgagaccagtttttcgctggtgtaacaggtcaccggcagcagcgggcggatcttttccgccagcgctttgccgcccggtgtcaggcaaaacagcgcaatgcgcttaccgcgaggctttgcggtactcatggctgaagcctgcgtcatacagttttgaatagtgatactcgtcgccgaggaacgggccgaccagaatcagtgcggtcttgcggatttttgcttcgcgcacggcgacggtgatctccgccagtgtgctgcgcagcacctggcaatccggccaggtcgctttatacaccacggcgaccggggtggtttccggataaccgccttcggtcagctgctccaccacgcctttgatatcctgaactgacaggaaaatcgccattgaggtctggtgagcggcaaagctgcgcagactctctttcggcggcatcggtgtgcggccttcgatacgggtgataatcaggctctgggacacttccggtacggtgtattccacacccagttcggcggcggcaccgaggaaggaactgacgcccgggatcgcgctgaagccgatactgtgttccgccagcacttcgccctgttcacggatagagccgtacagggaaaggtcgccggtctgcaggcgcaccaccagtttgtgacttttcacgccgtcaaccatcacagtgatgatgtcgtcgagggtcatggcggcgctgtcgtagctttcgacgccgtctttgcagtagtccagcagatcagtattgataagtgaaccggcataaatgacgatgtcagcctgttgtaaaatacggtagcctttcagggtgataagactgatatccccgggaccggctccgacaaaccagactttctgacggtcaaactgttcagccacaacgcgcctccttacggcaggaaataagataggtaggattattcggtttaaaataataactgtgtccgagcgcggtcatatttccggcctgtaattcacagcagtccagttcgctcaccgcacactgtttcaggtgtgcaatggcttgtgtcaggttatccagcaggataaaggtcatcaccagggtgccgtcgctgtgcagatgatcgagagaccagtcgataatctctgtgagatttcccccggtaccgccgacaaacacggcatctgctttttcagccagttccaccggtgcatacgcgtcaatcacgcggatctgcgggcagcggaagtgacggcagttctctttgatcagtgcaatggcttccggttttttctcgatggcgataatctcaagcgccgggtggctgagtgccgcctcaaccgaaacactgccggtgcccgcacccacatcaatcaggcgctgcgcaccctgtaaatccagccgcgacagggcgagagcccgtaccggctctttggtcatcgggatctgttgtccgcgcagaaacagttcgtctttcatcaggccacactgccttgtttatcaattaacaccacattcatgtcgtaatccccgctgacatcgtccgcattgaggatggtgatccgttcattgcggccggagaggttttctccgatgatcatccgccgggtctggccgcgctgaaggatttcggcggcgatttctttcgggccgatcttactgtccgtcaccatgccgatacgctcatgagcgagcagccagtcaaaatccgggctgcggttgtggctgctggtgagataaatatcattcatatccatccccgcacgggaacacagatattgtacggagctgatgcccggcactatctgcacctgctccggcgcgaaggtttcactgatacgtttgccgatgccgaaaaacatcgggtcaccggaagccagaatgacaatgcggcgatcaagacgctctgctatccagttcatcaggccgctgatatccgcatcaatgacacgggtttcggtggtcagcccggcaaattcatccagatggcgctgaccgccgattaaaatgtccgccccggaaatcacatccgctgcccgccgggtcagatacgcttctgagccggggcccacacctgtcacataaatcatcggaatccctccgttatggcgctgagcggccggttggtccccagcacctgattatcaaacgagaacagaatggcatcacagtgcggcggctcatcggagaaacgcagcatctgattaatccggtcacagattttttccgcgatccgcggatagaccgcctgccagccctgcgcattgatcagttcaatcgccgcttcggtggtggtacagccgtccacttcctgtaataaggagagcggggcgccgatcagggcgagattggcgatcagggtttccatccgcgcatccgcaatatggctgtgggtgtggaaaatgcctgccgcgatttttaccagtttgccgaagtgcccgaggatcaccacctgctcaaacttcagtcgtgtggcttcctgcagcatatagccgacaaagttactcatagtgacgacataggtgccgtccagcccgagctgttcgctgacaaaccgttcgccgtggttacccggcaccaggaaaacgcgggtcataccctgggcgcgtttcatttccagctcgatggacagggagcgtttccagctctcttccgacatcggcgtgacaataccgctggtaccgatgacagaaattccgccgagaataccgaggcggccgttataggttttcttcgcccgctcttccccttccggggcaaagatggtgatatctgccccccggttcggaccgatgacttcgcggaccgccgcttcaatagtctggcgcggggttttgttgatcgccgcatcaccgataggcagaccaacaccgaccttcgtcacccggccgacaccttcgccgccgtccagggtgataatgccgctgtcattgaccgcgacacgggcgaaaatcagcatgccgtgggtggcatcaatatcatctccgccatctttgcggatggcggcggtggcggattgcccgcagatcagcggatcttccacattcaggttcagtgtcacccctgacggcgtgacaatcgaaacctgctgaatcacttcctgacgcaacaccatcagcgccgccactttggcggcagcggtggcacaggagccggtggtataccccttgcgcagtgccttgcctttgtgccagacgacgccggtgccgttatcgtcaggtgctgtgatgttttcctgcgtcatgattacgcctccggcatccggtaaaggatggcgttgataatcgcggcggccacgttactgccgcctttacggccgagcgcggcgatacacggcagtgaactttctgccagcgcatctttggattctgccgcgccgacaaaaccgaccggcacaccgacaacggcaaccggtttttctgtgtgttccagcacacggaacagggcggtcggggcattaccgaagacaaaaattttctcacccgactcctgcatggcgatatccacggcggccatagatcgggtcatctgctgctctttggcggcagcgaccacacgcgggtcgctgacatagcagcggcactctgaaccgtatttcgccaggcgggttttgttgatcccggacagtgccatagtggtatcggtataaatagtgcagccgcgcataatgccgtcacggagaatttcaatcacaccgtcagaaaaatgcaggatatccagccagtcaaaatcggcagtggtatggatagcgcgtttgataattgccgcgtgatcatcactggcgaaacggtattccggccgtgtttcgcggataatgtcatcaatgatcagaaaactgtttttttcgatttcctgcggctgttgtatgtaactcatatttttcccttacaaaatccactgtgccagaagatgaatgacggcgaacagcgccagtgcggcggaggaggcaacccacatcagccggatggtgctgagaatatcgtctgcattgatgtcgcgggtgttgtcaccgatccacggtttatcaaccaactgcccgaaataggtattcggcccgcccagctgcacaccgagtgcgccggcgacagtcgcttcggaccagccgctgttcgggctgcggtgattggcgtgatcacgtaacccggtgcggaaagcctcgcggtaacggtatttcagaacaaaggcggcgaaggtgaacagcagccagctcagacgcgccgggatatagttggcgacatcatccgcacgggcggaaaacataccgatatcgccgtacttttcatttttatagccgaccatcgagtccagggtattcaccgctttataggccatcgccagcggcgcgccacccagtaataagaagaacagcggggcgattacgccatcggtggtgttttccgcgacggtttcggttaccgcgcgggtgatttgcggcggtgtcagctcccgggtatcacgcccgacgatccatgataatttttcacggctctcagccagatcatccgctttcagcgcgtcatacacccgcatcgccgcatcctgtaaacagcgggtggcaagaacggtgtaggtcatccagatggtgacgagccagccgagactggtttccagataaaacgccagcgccagcacgccgtaactcaccgcccaggtgccgccgacgatcacaatccacaacacggctccgccacggcgcagtgccgcaccgctctgacagcggcggcggatcacaccttcggttttacggatggcgttgccaatccagcggatcgggtgcggccagtgttccgggtcaccgaggcgccagtcgagcaggaaagcggccagccagctgagcagtgtcataacacactccgtgccagggcaaaccagtgatccaataaccccggacgctgggcaaaatgcacatgcagatatccggcaaaggtatttccgacctgataaccgccgtgccagcgtttgaggatttcgccgtcgcgctctttgataaactcaaaagcaggcggcagatcagtctcaaaatcagaataatgaaactcgtggccgcgcaggcattcaccggcacgaaccagcgtggtgtctgtcagagcagtaccttcgcagtaaccaaagcgcttcagtcggttacccatggtgctgtgcccggcaatgatgccggtcatcgggaaggtgttgccgctgctgtttgtcagggtttcaccgagatacatcaatccgccgcactccgcataaacaggaataccgcgctgatgcgccgccagcagtgcgtcccgcatcgcggtgttagatgaaagtttttcagcatagacttccggataaccgccgccgatgtaaatcatatggcacggatccggcagagcgctgtcattgagcgggctgaatgtgacaatctccgcgccgctctgacgcagtaaatcgagattatcaggataatagaagttaaaagcggcatcatccgccacggcaacggtcagcccgcgtccggcacccggtgtggcgagctgtattggtgtgctgtctgccggtgcctgccagtgtgtcagggaaagcagcttatccacatcaacggttttctctatctgatcagccagacgctgccagcgctcagtctgctgtgcctgctcctgcggcgggatcagacccagatgacgggaagggagttcaatatcactcatcaccggtacatagccgatcaccggcacatggcagtaatgttcaattgcgtgtttcagaagccggaaatggctgtcactgttaacccggttaatcagcaccccggcgatattcagtgacgggtcaaaatgctgaaatcccatcactgtggcggcaattgaggtggaaaccgctttgccgtcgaccagcataatcaccgggcagttcagctgttttgccatcgcggcagtgctgcaatagtgagggtcggtaccgaagccgtcatacaggcccatcacgccctcaatcacaccggcgtctttgtcctgcatataatgacggaattgcggggtcagaacggactccggcagcataaaggcatccaggttacgggaaggtacgccggtgacggcggtatgccagctgctgtcgaggtaatcagggccgactttgcagggctggacacgcaatccgcgtgcactgagtgcccgcatgatcccgagggtgatggtggtttttccgcagccgctgctggtgcccgcgattacgaagacctgtttttgtgccttattcatacgctacctttgacacggtgttgttgccaaaaaaacgtcctgataccaggaaagcaaaaaaaggttaaataaattaacccggtgaactgtctttttattttcatgatcataagcaacacggaatattgctgaacagcgacacgaaaatgtaatgatcatttaattaacattgccgatttttgatatagtgatttttttacggctatttatattcgggtttaataaaacataaaatgctgcttttatatatctgcttattacagtttgtgagtttcttcacataaatacttgatttgtgatcaagatgaataaaatgcaactattttatttttataaacatatgcaaatatgttaattaaatgatcttgtttttattatttgttaatgataatttcataaatagcggctgatttgttgattataataacctgtttttatgaggtgaatgtaaaaatccatttatttcagttggttgaaagtgcatgatctacttgattttttttcatgaactcttccgttacgtgaacgtattattgggatattagtcatatattttttcctgtgattatttaataatacaaaatattaaacagaattgtctttattacgcatttatcgtgaatagatcaaagaataaagttcacgggtaattaatactgctgtccaactacaaaacatcattaataaatagtattttttatcaccaccaggtgtcgtgcataacgaataaaatgatgtgattttttcatgttgattaatctgattgataaggcaataaaatgagcaaaggtaaagtatggctggtcggagccggacccggggatgcatcattaattaccgtaaagggacttcactgtatacgtcatgccgaagtgctggtgcatgaccgtcttgtcaatcctgagctgatcgcctgtgcaccggcggactgcaaaatcatcaatgtcggtaaaacaccgaatcaccatccggtgccgcaggaagaaatcaatgccatcctggtgaaatatgccgcagaaggcaaaaatgtggtgcgcctgaaaggcggggatccgtatgtgttcggccgcggcggcgaagaagcggaatctctggcggagaacggcctcgatttcgaggttatcccgggtatcagttcctctatcggcgggctggcgtatgcggggatcccggtgactcaccgcgatcacgcatcaagcttccatgtggtcaccggccatatgtgtcaggggaatgagccgcagaactggaatgcactggctgcccttaacggcacgctggtgattctgatggggatgacccgcctggccgaaatcagtcagttgctgatcgacggcggaaaatcaccggataccccagctgccgtggttatgtatgccagccagcagcgccagcaggtggttaccgccaccctcgccactttaccggaagaggctgcgcgtcataaattacatccgccggcactgattgtcgttggtaatgtggtgaatctgcaccagattctggcatttgcggccacacaaattgatattacgcaggaagccccattagaagctgcgtcatagtattatccttaaaataataagcatccggctgtatgcaggtgatactgtgtgcagcccttacatttggaggaggctatgagcgaacacggtggtaatgtggtagaggtggctgagctcctcggcatctcacccgcatctatcttcgatttcagtgccaatattaacccgctggggccgcccgagagggttaaagccatcatccgcgataacctgtcagttattgaacgctacccggatattgaataccgctatctgcatgccgcactggccaaaggtgcgggttgtgaactggggcaggtcattgccggtaacggagagacggaactgatttacgcgctggtgcgccatctcaacccccacagcgcattactgttaacccccggatttgccgaataccgcagagcactggaacagcagggctgcgatatcatcgaacacccgctgacggaagagaatgatttccagccggatgaatccctgctggcggatattgaagcccgccgcccggactgtgtgtttatcgccacaccgaataacccgaccggtctgatgccggataccgcactgctgcacaaactggtgtccctgtgcgaatcccgccatattcatctgattgtcgatgaagcgtttattgattttctgccggaaggatcaccgctgacagcgcgcctgccggaaacccgctacctttatctgctgcgttcgctgacaaaattcttcgccattcccggtctgcgcctcggttatctgctgtgcggcgacagccacatcatcagtaatctgaaagcctggcgcgagccgtggacgattaatggtctggctgcgctggtgggtgaagcactgctggatgatgaagactatatccgcaaaacacaggagtttattgccgcccagcgggaatacctgtgcaatgaactgcggcagtttcctctgctgaaaatccggcagccatcggcaaactatatctttatccgctgcctgaacggcgtggaacttcagtctgctctgctgaaatataagctgctgatccgccgctgtcagaactacccggggctggatggctcttattaccggatcgcggtccgcagtcaggcggagaaccgtcatcttatcggcgcattaaaacaggtatttcaacatggctgaggcacattgtccggcatcctgcggagaattgttgcagggatggatcctcgggggcgaaaaactggtttcctgccccatcaactggtacagctatgtctcggtggaagaaggtgttccgctgggactggaacggccccgcatgcgccagatgctcgaacgggtactgaaacacctggatatcgtaccggaagctaccggtatgctgcggattgaatatgaatccaccatccctgtcggcaaagggctggcgagcagtacggcggatattgccgccaccgcccaggcgaccgcacgtttttacggccatgaattatcaccggaaaccctcgcagaactgtgtgtggcggttgaaccgacagacagcacactcttttcctccctgacactgtttgatcatcagacagctgagacacagatatcacttggctgggcgccggatctgaaactgcttctgctggaaagtccggatgtggtactgacggaagatttccacaaacgcgaccgccgggccacactgctggcgcgggaacctctgctggctcaggcctggaaactgcttaccgccgcctgtgaacagcacgatccgcagcgcctgggcgaagcggccactctgagtgcggtcgccagccaggatctgctgcccaaacccggcttcagcgaactgcatgcccttgcagataaaggaaagatttacggtctgaatgtcgcccacagcggcagcgtggccgggcttatctatgatgataccctgcacgataaagattttatttatgactggatccagcggcatcagctggacagatactaccctcaggtgcatgaggtgagcatggcccgtggcggggtccgctaaatactcatcatccttcagcctgtggctgtgttggcttcattcagctgaccgggtcacatactggtgtatgctccccggtcatcctcactttgccgccttgccacagaccgaatgattttgagtattcctatccgcgtcattcttcaatccgcagctgtgttggctgcactcaataaaccgggtcacatactgatgtatgctccccggtttctttcatttgccgccttgctgcaaattgaataatttagcggatgactcctgagtctctttttatttaacgtcctgactcctgtggaatgatattgaatatccacggttttcatcatgccaaagtaaaaggcagataaccggcaaagagacgaaaagcatgcgcgtcatggatgacgcgcctgagcgcacagggaggtgtttacagcggcttttcgttttgccggttatcagcccggctccgatgctgagcattcctcctctatttaacgcgctgccccacaaagtgcgcgccgctttgctgcgtcccggtaacgggcaggatatgattcagacaactgattctgacgctgtccgcaaaggagacactatgctgcgttatccgctgttttgtgatttacagggaaagacctgtctggtcgtggggggcggggaagttgccgcccataaatgccggacactgttacaggccggggcgcatgtcaccgtcattgcccgctggttccacggagatctcaccgctctggcgggagatccgcatctgacgctgacggaagcggactttgatgccgcactgtggccacagggctgctggctggcctttgccgcgacagactcgccggaggtgaatcagcaggtgctggaacaggccaatgcccgccactgcttctgtaacgtcactgatgcgccggaaagcgcctcatttatctccccggccaccattgatgtcccgccggttcaggttgcgctgacctgcggcggaaacccggtctatacacagttcctgaaacaccgtgttatgcaggcgattccggcggatgccccggtgaaactgcgtgccgccgcacggctgcgcgagcaggttaaagccaccaatgcttcccgcgatgccaaacggctgttctggcagaaattctttaccgacaccgccctggaacagctcctgccgctggaagatgaggaactgctgactgactacctcaattacctgctggctcagtttaccgaagagcacggaacccgctgataaaataaaaccccggcaccgtaatagcggttccggggtaattatgtgagctgaatggcttatttcagccattggaataacaaaaacaagacagcatcattatcatattaataataagttatttacttttttgcatcatttatttttttatttctctgcggcattccgttgcatactttaataagatgttcgtcacactatttcgtcattttttatcaaaatatattcatgtggaatatactataaaatatagtttaaacattaaaaattaattgctatttacggtgaatttaataatataacaatgatcacaaaatcaggattgatttatttgtcattaggtttaaataattgttaattaaagtttttgtttgttgtttttgatggtatctatatgattttaaatggaatttaagtgtgatctgcatcgtgttttataccccgctgaaaaccattccgtttttgcaagatatccttactttatatcaattgtttttaaatcccctgaattgcacattatcatcagtggaaagttaaggaattaaatagggatgaacacctgatttgtacttagatactttcttaattaataccaaacggatttaaccggttttgttttaactttaattccgaacattcagtttatttagaggtatatcatgcagaagcctaccattgttattggtgtaattggtgccgattgccatgccgtcggtaacaaagttttagatcgcgtgttttcccagcacaattttaatgtgattaacctgggtgtcatggtcagccaggacgaatatatcgacgccgctattgaaaccggcgcgcaggcaatcgttgtttcctctatttacggtcacggcgaagtggactgtttaggtatgcgtgagcgctgcatcgaacgtggtctgggcgaaattctgctgtatgtcggcggtaacctggttatcggtaaacaggaaccggctgaaatcgagaaaaaattcagcgacatgggctttaaccgcgtgttcttcccgagcactgacctggaatacgtctgcgatgtcatgaaaaaagacattgaaaaaagcccggcccgcaaagaaggaatgaccgcgtaatgatcaacgtctcgatagatatcggttcaacctggacaaaaggtgccgtgttcgacgtgggaagtgatgatcatattgaattaaagaattatgccctgacccccacgacgattgaccatctggcagacggatttttcactgtactgaataaaatcctcaatgtgtccgatgcgcgtcctttactggaagccgggaaagttaacattaactattcctcttccgccaaaggcgggttagcggtagcggcactgggtctggttccgacaattacccttgagtcagcaaaagtcactgctcactcagcgggcgcaaaagtgtctcagcactttgcgtacaagctcaaccggactgatatccgcaaactcgaacagacacccccggatattttcctgttcaccggcgggacggatggcggcgatgtcggatacggattacaaaacgcaaaaatgctggcggaatccgatctgaactgctccatcatttatgcgggtaaccgtgatattcaggacgatattgctgagatcctcggccataaagaactgactgtcgttaacaacattttaccgagtctggatagtccgaacccgtttgatgcgcgtaaagctatctgtgacatttttctgaaaaagattgtgaagggcaagggactggacgtcattgttgaacagaccggcgaagagccgcgtccgacaccattctctgtctttgagttagtacagcaaatccgtgacaacgttcccggctgggaagagtttgtgctgatggatatgggtggcgcaacgacggatatttattcgtcctgcaacaacagcttactgccggataccattttacacgggattccggagccgaaagtgaaacggactgtggaaggtgaccttggcatgcgtgtatcggcggtgatcgccggtgaggcaggccgcgaattagccgaagcgcagtttgtgaatcatccggagcagctggatgccttttaccgctacacccgttatgtcaatgagcaccctgattatctgcctcagacggacgaagaacgtgtttatgaccatctgttagccggtatttgtgtcgcactgggaactgaacgccatgcgggcacaaaacagcaggtgaccacctgtgcaggtacggtggatttacagattggccgtgatttatcacgggtcagcaaaatcatcggtaccggcggctggttgtcgcggacagctgattttgacattaaacagtatatgcggtaccgcaaattcgataacaaaggccgtcagattctgctgccggacgaatttgagtactaccgggattcacaagggttatttcctctgttagccaacgtcgcctgccggtatccgaaagcagcagctcagaccggcgtgcagattttgaccagatagcaagattattggagccattaaatggaactgaagaataaaaaaattgcaatcgacgacttcatggccgagcgcaaagacgtattaaagacctgggtgacagggaaagacgtggaaaactttgaagatggcgtcaaatatcagtcgactatctctgaagataaaaactttgccaaaaaattattcgaagctgaccgcgacggcatcacattaagccagccgcgtgcaggtgttgccttaatcgaagaacacatcgagctgctgaaaaaactgcagaaagagtgtgacctgctgccgaccactatcgatgcgtatacccgtctgaaccgttatgaagaagcggcagtcggtatccagaaatctgttgaagccggtacctctaaactgaacggcctgccggtggttaaccacggtgttgcagcctgccgtcacatcactgaatccctggataaaccactgcagatccgtcacggaaccccggatgcacgtctgctgtgtgaaatctccatggcgagtggtttcaccagttacgaaggcggcggtatctcctataacatcccttacgcaaaacgcgtcaccctggaaaaatccatccgtgactggcagtactgcgaccgcgtaatcggtttatatgaagaaaacggtatccgtatcaaccgcgaaccatttggtccgttaaccggtacgctgatcccgccatttatttcccacactgtggcaattatcgaaggtctggtggcgctggagcagggcgttaaatccatcaccgtcggttacggccaggtcggtaacttagtgcaggatatcgcggcaatccgctccctgcgtgaactgtctcatgaatacttccgcgcttacggctacgaagattatgagctgagtaccgtattccaccagtggatgggcggtttccctgaagatgaatcccgtgcggcagcagttatctcctggggtgcggcggttgccggtatgtccggtgcaaccaaagtaatcaccaagtctccgcatgaagcattcggtatcccgactgcggaagcgaactgccagggtctgcgtgcctccaaccagatgctgaacatggtccgcgaccagaaattcccgccgtgcaaagacgtggatctggaagtggaactgattaaacgcgaagtccgcgcagtgatgaagaaagtccttgaactgggtaacggcgacattgctgtcggtactgtccgcgcattcgaagccggtgttctggatattccgttcgctcctgcgatgtgtaactccggcaagatgatgcctatccgcgacaacaacggcgcaatccgtgtgttcgacgcaggcgctgttccgctgccggatgacgttctgtccatgcaccatgatttcgttgctgagcgtgcccgcgaagagggtcgtgaagcttcattccagatgattattgatgatattaacgcagtatctcacagtaaattagtaggaagaccataatgaaaattaaacaggcattgttcacggcgggtaactcatccttctattttgacgaccagcaggctatcaaagacggcgcaggtcacgacggtttcgtctacaccggtaagccggtcactccgggctttaccgcagtgcgtcaggcgggtgagtgtgtgtcagtccagttaatcctggaaaacggttctgtggcaatgggtgactgtgccgcggttcagtactccggtgcgggtggtcgtgacccgttattcctggcggaaaacttcattccgttcctggaaaaacacatcaaaccgctgctggaaggccgtgatgtcagtgagttccgcaacaacgctaagttcttcgatgaactgaaagtggaaggcaaacaactgcataccgctatccgttatggtctgtcccaggctctgctggatgccaccgcgctggcaagcaaccgtctgaaagctgaagttgtgtgtgacgagtggcatctgccggttgtggctgagccaatccctctgttcggtcagagtggtgatgaccgctacaacgctgtggacaaaatgatcctcaaacacgttgacgttctgccgcacggccttatcaacaacgtggatgaaaaactgggccgtcagggtgaaaaactgcgcgcttatgttgagtggctggccaagcgtatcgttgaattacgtacagaagacacttacaacccgtctctgcacatcgacgtttacggcaccatcggtttaattttcgacaaagatccgattcgttgcgcagagtacatcgcaagtctgcaggagcaggccggtgatctggaactgtacatcgaaggtccggttgacgcaggtaacaaaccagaccagatccgcctgatgaaaggcattatggatcacctgaaaaaactgggttccaaagtcaaaatcgttgctgacgaatggtgtaacacctgtcaggacatcatcgacttcacggatgccggctgctgtgacatggttcagatcaaaacccctgacctgggttctgttcacaacatcgctgacgcggtgctgtactgccagaaacacggtatggaagcataccagggcggtacctgtaacgaaaccgacgtcagtgcgcgtacctgtgtgcatatcgcgattgcgacacgtccgatgcgtatgctgatcaagccgggtatgggcttcgatgaaggtatgaacattgttcataacgaaatgaaccgcacactggctgtactgaaagcaaaagcataaggaagcattatgtccaggacatttaaaatcctgtcccctactgcaatcctggggtacggatttccggaagagagttttatgaaggcgatggaagaatcgccggatcttatcgccgtcgacgccgggtcttctgacccgggtcctcactacctcggttcaggtaaagcctttaccgaccgtgccggggtaaaacgcgacctgcgttatatgctgaaagccggtgtgaaaaacaatattccggttgtcatcggtactgccggtggttcaggtgcacagcctcatctggaatggtgccgtgaaatcattctggaactggcaaaggaagaaggtctgtcattcaagatggccctgatccctgcggatgttgagaagaaaaccgttcacgaagcgctggatgcaggcaaaatcacgccgctggcgttcgtgcctgaactgacgcatgaagtgatcgacgaaagtacctatatcgttgctcagatgggtgtcgagccgttccaggaagcactggcagccggtgctcaggttgttctggccggccgttcttatgacccttgctgcttcgcggctctgccgattatgaaagggttcgacgaaggtctggcactgcactgcggtaagattctggagtgtgcggcaatcgcagccaccccgggttccggctccgactgtgcaatgggtattatcgacgaaaccggtttcaccctgaaagcattcaacccgatccgtaagtttacggacacctcagcagcggctcacaccctgtatgagaaatccaacccgtatgtattaccgggaccgggcggtgtgctggatctgaaagagtgtaaatttgaagatctgggtaacgggcaggttcgtgtaaccggttcacgccatgtatcaacaccgtataccgttaaactggaagctgcacgtccggtcggttaccgcaccatcactatcgccggtacacatgaccctatcatgatcgccggtatggataagattctggtggaagtgcgtaaaagtgttgagaaaaacctcagcatcgaccctgataccgtgaaaatgaatttccatctgtacggtaaaaacggtgtgatgggtaatgcagaacctgaaactgtgaccaaaagttatgaactgggtattttactggatgttgttgctcctacccaggagcaggcggacagtatctgttccctggcacgttccactatgctgcactacgggtatgatggccgtatcgccaccgcgggcaacttagccttcccgttctctccgtcggatatccgtgccggtaaagtgtatgagttctccatctatcatctgatggaatacaccccggatattaaattcacattccgtatggagaatgtaacacctgaaggagtggcgaaatgaaaaagtcaattttagaattagccaaagttgtgcgttctaaaaactccggtccgtatgaaattgtgatggatattttattcaaggataaagaaacttataccgcggtaaaaaattcaaaacaatttaataaagacttagtcgctggtctgtattgtgtgaaacctgactttatcgataatattgtctggtttgacccggcgaatgctgtgaaaattgtaatgccgagacatattgtttctggtgctgtcggagataccgatgtttatggtgcccagcaacatgcgcctttattaaaaatggaatttgatatttaacaatatcagtcattcaatatctcattagtacgacaactcggtgtggcgtacggggttcccccgcgctccacatcgatttcagaaacagaaatcgtcatttttctcagtgtgatgtataaaattatttaatatttaaagccacggaaggctgggtaaaaataactgaaataaaatttcagaggatattaagtaagttgagaataaatgcgacccaacacagaatggaattattatgaaatcgaagagtttaaccacttggatagtcattggtcttattgtcggtgtgattgtcggcttcagctttaatgaaatggcatctgctgaatttaataaggtctatgcaaaagatatctccattattaccgatatcttcttacgtctgattaaaatgattatcgccccattgattatatcaacactggttgttggtatcgcgaaaatgggtgatgcgaaaacgttaggtcgtgttttctccaaaacactgttcttatttatctgcgcatcctttatctcaatcctgttaggtctggttattgttaacctgttccagccgggcgcaggtattaacttcgttgcggatactgccggtgcggttcagggtattgtggaacctgttcctttctccttcaaaacctttattgctcatgcgattccgaccagtatcgttgatgcaatggcgcgtaacgaaattctgcagattgttgtattctcaatctttatgggtatcagcctctccgctatcggtgagaaaggcctgccgattgtgaatgtgctggaatccctcgtcagcctgatgctgaaattaaccggttacgtcatgctgttcgcaccactgacagtgtttgccgctatctccggtatgattgcagagcgtggtctgggtgttctggtcagcgccggtatcttcatgggtgagttctacttcacactggcgatgctgtgggtgattctgattggtctggctgcggtggttgtcggccgctgtatcttccgtctgaccaaaggtatcactgaacctgcactgctggcattcaccacatcaagttctgaagcggcattcccgggtacactggaaaaactagaagagttcggtgtttccaacaagatcgccagcttcgtactgccaatcggttactcctttaacctcgttggttcaatggcttactgttcgttcgcggttatctttatcgctcaggcatgtaacatcaccctgtctatgggtgagcaggttaccatgctgctgattctgatgctgacttccaaagggatggccggtgtaccgcgtgcgtctctggtggttatcgcggcgacactgaaccagttcaacattccggaagcgggtctgattctgctgatgggtgtggatccgttcctcgacatgggccgctctgccactaacgtaatgagtaacgccatcggtgccgctatcgtcggccgctgggaaggtgagcactatggtgaaggctgccgcggaaaaccaaaggcagttattgaacctccggtagcacaggccacaacatcagcctgaccggtcgttcagaataaacaagacaggcgcggtacaagggatacagataccgcgcaacaataaaaaatcagttttatgtattaagcgcaaaatgccctcagtcattttgcgcttttttttgggttactgcggcacggcggaaacactcaccgtgccatccgtcaccttaacggcaaaggcggcgacggaatatgcggcgtcttccgcacacaacccgtccgtcagccggaaacgctgttttttcagcggactgacaatccacagtgcgccgtcatgctctgcaattaatccgcgcgacagcacgctggcctgcgcaaaaggatcgatattactcagggcaaaaatgcgctcgtccggatatggacggaacagcgccacctgttcaccctttaccagcgcacacacgccggttcccggggtgatatcactgacctgacaaaccgtaatccattgactcatgattattcctccccgatcagagtgacagcaatccgctcttccggacgggccggacgatgttgtaagcgctcacttaccatttgcacattcggatccggcagcgggctgttaacaaagtggctgaagcgtttgcgggcatgcgggttgttcaccgtttcctgccactcgcaggtcactttttcgcgcagctgcgccagttcctgctccagctgtgcattgagccccagcttgtcgctgacaatcacatcccgcaggtaatcaatcccgccttcgaggctttccagccaggtggatgtccggctgagtttgtcggcggtgcggatgtaaaacatcataaagcggtcgatgtagcgtatcagggtctctttatcgaggtctgccatcagcagatcgccgtggcgtggtttcatgccgccgtttccgcagacatacaggttccagcctttatcagtggcgataatcccgatatcttttccctgcgcctccgagcactcgcgggtacagcccgagatgccgaatttcattttatgcggagtgcggatgcctttataacggtgctccagctcaacacccagcgcagtgctgtcaccgaccccgaaccggcaccatgccgtgccgacacaggttttcgccatccgcagtgctttggcgtaggcgtgcccggtttcaaatccggcggcgatcagtttttcccagatagccggtaaatcctgcttttgcgccccgaacatcgcaatgcgctgtgagccggtaattttggtatacagatgatattcctgcgcaaccgcaccgatagccagcagaccttccggggtgatttcgccgcccggtgagcgcgggatcaccgaataggtgccgtccttctgcatattggcgaggaagttatcgttggtatcctgcaacggtaccaggtcgtcgcgcagaatatagtcattccggcaggacgcgagcagagagccgatagtgggtttgcacacttcacagccataaccttctccgtaacggcccagcagctcatcaaaggtagtgattttttccacgcggatcaggtgatacagctcctggcgtgaataggcaaaatgctcacagaggtgatgattcacctcaatacccagattagtcagttcggtattcagcacctgagtgatcagcggaacacacccgccgcagccggtaccggctttggtttccgctttgatatccgcaaccgtctggcaaccgttatgaatggcctgaataatgtctcctttggtgacatcaaagcaggaacagatttgtgcactgtccggcagggattccacgccgatcgccggtttgctgccggcgtgtgccgggaggatcagaacatccggattttccggcaattcgatacggttcagtgccagttgcagcagattaccgtaatcttcggtatccccgaccagcacggcacccagcagatatttattgtcgtcgctgacaatcagccgcttataaacctcattggcttcatcgagataaatataactgtggcagccgtcgtcggtcgcatgtgtattgccgataccgccaacatccacacccagcagtttcagttttgcactcatatccgcgccggtgaactgattctcctgccccagcagatggtccgccgccacctgtgccattttgtagcccggtgccaccagtccgtaagttctgccgtgccatgacgcgcattctccgattgcatacacatccgggtcagatgtctgacactggtcgttaattaccaggccgccgcgctcagacacagccagtccgcactgacgggcaagccggtcacgggggcggatcccggtggaaaagacgacaaaatcggtctccagcgatgaaccatcggcaaaatgcagcactttgcggctctctccgctgccggatgcggtaatttccgtggtgtttttgccggtatgtaccgtcacacccatccgttcaattttttgcttcagctgttcaccaccgagtgcatcgagctgttccgtcattaataccggcgaaaactcaataacatgggtttcaatacccaggtttttcagggccccggcggcttccagccccaacagaccaccgccgatcaccacacctttgcggctgcggcgggcgcaggcttcaatggcattgagatcttcaatcgtccggtaaacaaaacagtcgcgggtatcactgcctttgatcggcgggatccacggataagagccggtcgcaatcaccagtttgtcataatgcacagtgcggccggtattggtatgcagcaccttttcctgacggttaacggtaatcacccgctcattgattaataccgaaatattgtgtttttcatagaaaccgggtttaaccagggataattcttccgccgtatgatgagaaaaataggaggagagatgcacgcggtcataagcgacacgcggctcttcacagaatacggtgatatcgaactgtccggcgtccgctttatcggtaagctcttcggtaaagcggtggccgaccataccgttaccgatgattgctaacttgacgttgctcatttcagcctcagattttgtgtggattaaggctaaaaatacggcgatcccggtttttctcattgatgtatatcaaatgcagcttaatcaattcagcttatgtaattcattgctttaaataatttttgtcaatactccttaaggggtagtgatgtattggtttttcaaccggttatttttactcatttaatggcaaatatatatttcacgacatatgacacaatttcctgattaaaagaaatatatttaactaaagggagatatctgaaataaccatccggaaaacagaaacggataacaccaccgtatatcagagggatgttatccgtacggaatgattagcgggaagatgccatcatatcagcgcgggctttgcggtttttaatactgataatcagaataccggaagcgaaagcgccgcagcaggcaaacaacgccatcaggccgaacacgattttgtaaccggtcatgcccggatagctgtcgagaatatggccgtagaggctgaagcagaacatggccggggcataaccgataaagctgcccagtgccattgcagccccggtgcttgactctttgatattggcctcaccaatcggcgcgaagaaaatcgcgcgctgagtgaaaacaatggtaccaaagcccagtgtgcagaccattcccagataaaccggcatactttcgtgcggcaggaaaataaaagtgaccaggacaatcacactgataataaaggtataaaacaggtatttggtcggtgattttaaaatcttatctgcgattaatccgccgatagggccgccgaccattttcaggcaatactgattcagaataccgtaaataccgaccagtgcgacaggcagtgcatagatattactcaggaacggaataaagaaggtcagcccgcaataaacggcgtagacaaagaaaatactcagggcaatcagccagacggtgccgtcttttaataccgcgctgacaccgggtttcttctctttattttcaccggattcattcaccggctcagtgacggcgtgtttatcatctttcaggaacaggaagataataccaccgaccagaatcgccacaccggaataaaataagatccccattttaaaaccgagataaccactgccgaaccaggcaaagaccgcaagggcggagaaggccaccacggtatcgaccacaccgcggccggtttcaaagaagccgaatatccggccctgctgtgagctgttgcccagcaggctgacagattttaataataccggccagttgagcatatcgcaggtgacaccaaataatgcccagacaaataaaataccccagtagcccggcattgtggataaatacacacccagcaaaccggttgcaattaatgagaatgaaattgtcagacggcgcggtaatttgtcagaaaaataaatagataaaaagaaaccaatggtcgtgacaattgagtttactgacatggcattaccaatctgaccatttgtcagatggaaatattcctgcatcggaacataaaatgcatctttcagtgacggtaatttatagatagtaccgccgcacagaactaacaggctgaatatagcccatctttttttatcaagcatagtgtgcctcccgactgaaaataattttcagtcagtgttgagtgttgtttttaaattaatggtgtgtagtgctgatatttttttatttattaataacggcaagtgcctctgtttttatttcatcaatgacgttacggacataaatcagctgattgacggcatcttctttttcacgggcgagacgttcttcaatttcgttttcaggtaacggtgtttcactcagctgacgccacgggatccacggatcattcccttcatttttaaaacggaaggccggtgcgtaataatccacttcttcttccagcccgtaggaaataacctgcggtttctcttcacccagacatattaatgcccgcagcatctctttaaacggcagattaccttccccggagcggcaggcgg

SEQ ID NO: 75 - DNA, 971 bp, unknown
  Altogen 322075 strain
cagataatagcggggattttttttctgatacatcgcttcacgaaactgaaactgccccattgcccggtaatatcccgcctttgcactggcatacaaataccggaatccccgttcccagtcttcctgtgttctggcattaataaactcactgacgctgatatcattggcgaccgcaccaccgccgccgaatttcattccgcactccagtaatgcgcgggattctttataacgctttaccgtcaggaatatattggaaacggataccattgcatccggatcgcctgattctgctgcacggtaaagataaaatgaggctggtgccggcgctgttttaaagccactgcggttatcattgcgccgctgactcataaaataaaaagcttccgccacattctgactcatcagctcatcaatataagcccgcgcctgttccgggtcagattccgaataatagttcctggaattttgcatatacagcttcgccatcagcagtttggctttccagtgccccatatcagctgctttccgtccgatgatatgcatatttctgtaattcgcggtatcccgctggccgagtatctttttcgcggcacgatagtataaatccgcatccggatctttcggcaatggcggatcaaaacggcgggcatcctgacaaaccggcgtcgccacagtgacgaaattaattttttcctgctttttattaatatcaaatgctgccggtgctgcctgcgcagacagtagcggaaacagcagcagtaaggagaatgttattattttcatatcgcatccctgatattattttttctgtcagttcgtcagtcccgttaactggattttggccaccaggcggtcataatcaaaatcagtccggtaatcttccgcatcctgcgcactcattccgacggtaatatcatcattccacggtggtaatgttgccggaggtagcggaatgattttttcaaggttcg

SEQ ID NO: 76 - DNA, 7695 bp, unknown
  Altogen 322075 strain
aatctcaattttgacgaactggcgaaagcattgggtgaccgggttattgaccgcctgagaatgggatcgccgaccgttatcaatttcacctgggaaagtttccgcagacaggttaagtagcggcataacccaagacagaaggacttttgatatgagcggatacgctttgcttcaggaatattatttcactgatgcagacaaacacgtctggatggatgccatgagttatttactggaaaactacagcgagtttccagcagatatggatatgaatattcagcataagcctgagttcaggaatttccggtttatgagggctcctggcggcggggttatgtttgcaaactgcatcgtgcctggcattacagctgacgactttaatcagttcagagcgattaactgaggacttttgattatggagccaacggattttgaaaagtggtgtgcgggcgagcttggctattcgcctgagttcatcatgagccaacggagaagcgactttttcggtaccactgggtacaagttgagcggggttgaagttagataccgcgcctacatggccggagttctcagcagactgccgtaccagacaccgccaaaaggagatgaagatgaagggtaagggaacagatttcaaaacactgatgatgattttccatcgtgagcgggtttctcggcttgtcagaggtataaaaaacggcatgaggttcagtgagtatcgtggacaaaaatacagatgtgagcgggtaataaacaaacttctggtgctggaatcccaggctaaattacggagaagtcaccaatgaaatggattaagtgctcggaaaaatgccggaggcggatatttatgttttggctctacttaatggctctccgcaggtgctgttttttgatccacgcataaatatatgggatgacggtgatttccactcattcataaagcctagcaaggtgacacactggatgccactgccacaaccaccggaggagtgatgaaagcaatatcaatcagacagccgtgggcatggctgatagtcaacgggcataaagacattgaaaaccgcagctggcgcacgaagtatcgcggtcaggttcttgttcatgcgtctcagggcgtaaatcggagtgactatgacgctgcgtatgctttggcttgccgccttggaattaagcttccacaccgttcagagtttgaaaccggcggaattgtcggggtaaccaccatcaccgactgcgtggaacaaagtgaatcgccgtggttcttcggtgaaaaaggtttcgtcctggtggatagcagaccgttgccgtttgtgcagatgaaagggcggttaagcttttttgaaacaggaatagagccggaggaatagggggtaatgtggaaaacttctgcctgcatgaatccaacaaaaaactgttttacgagcaactaaaatcactactgaacacccacccgaagttaagtatcaccgcaaaaccctaccgcccgaaacgaagcctttcacaaaattcactcagccatgtctggtacaaagaaatcagcgattacctgattcgtgccggtcgtccgttctgtacagaggcatgggtaaaaagaagtctgaaggcgacatacctcggatttgaaaccactgagtacaccgatgttatcaccggcgagaaaacgcagcgtgagacgctcaggcgcacttcaaaactggataagggggatatgcattactttcttcagcaagtcgaatcatgggctgcacagttcggtttaatactgactacgcctgaggattcggagtacatgaaactcaaaagggagcaggacgcatgacacgacaataccttcacaccaatgagcagaagcaggatatgtgcctgaaaataatccggtcacttcgccaccttgataccttcacggtcaagatggttgcgcaggccaccggcctcggcagcatgatagacgctaaatttgtccggctgttgcaggatatcggcagtgtccacgccgtgcgcaggaaaggcagtcaggtttattacgcttttgacgatcgtgcagcatccaaagtcagggcgtatttcagcagcctggccgaaaagccgaccccggtagctaaggcaaggatgacggtggtcaaggagaaggcatcgcgtccaaaatccagaacccgcccgtttgagcctgggttcgggtggtcgttcatcaatgaaattgacgcaatgctgcgggaggtgcggacgtgaagacaaagcaaactaggatggaattaacctattacgaaaagtgtgaagataaaaagtcaaaaaagtacatggtgagtcatgacaacggaaaaacaaagctggagcaggagctgagcgttatctgtgatttgtttgttagccgcggcttcaaagttgaaatagctatcgacgatttcccgcgtttcgataatgaaaccgaggctgtgctgaagtatgccgactggcttgagcgactagggattgcaatgcgccgtgaagcgaaaagagcaattaagcggggtataccatgatatgccaactatgcagtaaagaactggccgacgatgaaacatggctgtgcgaccagtgcgccagcgaatgtccgcatctggaagtagtcgagaagataaaaggagatggtggtggcaaaggcaaagcagccaaagccgaagaaatgtaaagtctgcgacaaagaattccttccctatctatccactaaaaaagtttgttccattccgtgtgctatcaaatttgcagccagtgaagtgcagcgaaagtctgaaaaagaacgcaggcggcaggattcaattgagcgtaaagaattacgcgaacggaaagacaaactcaaatccaacagcgatttagcaaaagaagctcaggcagcatttaacagatatatcagggcgcgtgaccgtggaaagccttgtatcagctgtggatgcgatttggttgatgcttccggatatctgacgggaagtgctacagacgcaagtcattacaggtcaagaggtgcggcaaaacatctcaggttcaatgtttttaatgtccactcatcgtgtaccaggtgtaaccggcagttgagcggaaacgctgttgagtaccgaatcaggctgatacagaggatcggcatcgaaagggttgaggctatcgagtcagataactcaccacggagattcagcaatgaatatctcaggcgggttaagcagatatttgcaaggcgggcccggtggtatgaacgcaggcggaaactgatggaggcggcgtaatgttcacagacataccagcagcaatcgaagaagccagatatctcatgaacaccagtgggcaccatcatgctgtggtgcaatccagcgctggcgtgatgttggtaaggcttctttacgggcttggtgtggcggccagaagaaaggggatgttttcaactgatgttgatggcatgggcgttgttattccggaggtaagatgagactcgcagatttaccaaaatacttttcaccgaagagtcctatgttcagtgactctccagccgcaacagctactgattcactttcaattaccgatgtcatggcctcgcttggtttggcgaccgcaaaagcgtggatgggtattgaattgtttttggcgaaacacggaatcaatcagccggatgaagcggtggagagtctctatcaatatgcattaactcaggcgcataaatacagcgttatccaaaagcttgatgaggatgttagagcatcagttctgcaaatactcgcaaattatgcatttcaggattacaccaggagcgcggccagtaaaaagccatgccctgattgtgatggcggcttcatcgaagtggaggtgttcactactaaatacgccaccaaggccgggtcatttgtttcttcacgtccgctgtcacctagtcgtgccgtaagcagcatgagagaggtgcgcgagataaccaaggtaacctgtccaacctgtaagggtaaggcggttatcagccattcgtgccggtgtaatggtcgcggtgaagtgctggataaagtcgaaagtgaaaaacaaggagcgccgatatataagacgtgcccgaagtgctccggacgcgggtattcgcgattgcctgctgaagatgtgcgacgggcaatatgtgaatccctgttcgacattccggaaacatcatggcggagaaacctgaaaccactctatgaggcattgatacaggaatgcttcaaagaggagtctaatgcggaatcaattctgcaaatggtaactaaaagagaatctatttctataaattggcaattaaatagaaataacaattgacattttggcgatagtagcccatcattatcccaacgatgggttattgccatttcgttaaagtgacaggataaaagaggcggctcctgttattgatcccgcctagttcgtcacttcgccgcagggctgggactcgaaccgcatcggctgagaggtcgaaagaatgcagagcgaggaagtaagtaaacggcgcacaccggcgggaaaccggccttgtgccgaagcatgcataacagccctctccggagggctttttcatatctgcaacttgtaagagttacttacaggttcaactctccggattttccggatagttcacatgttcggttattccgaataactgaatacttgctgcaaggctctggtagcgcagggcagtccggctgaactaaatcagcctctcttttcaggcacaaaaaaagccggtttgggaataaccggcataaagaataaacgacattattttcatataaattcaggtttttgttacctttcgattataacctgaaaatacgcatttatccgtaataagcttgaaaaacgattaaacatgcgaatgtgtcttttatagacttatctatcagatatttattgtgtgaattaaaagtaatacatattacaaaggtcgccatgtgcggccttttttcatatacgccgccacagaatcctgaacaaacaaacgtaatcagcgcagagatactgtgcgcggcaccctattaacttctaataccctccgtcaggaggtaagccatgaaaatgaaagaaaacccagacgtttgggatcaggtactgatgtatctgtctcagtacaaagaccagggcatatttgccgctctcgctgggtcggtggctatccttcgtggtcgctataacggcggaggatggaagaagaccatttttgacgggctgatgtgtgcaatcttcgcgtggttcgtgaaggacttgctggcgttactcggccttaatcctgatttggcgtatctgaccagtgtattcattggttatatcggtgtggatgcgctgagcaaaataatcaaaggcagggcgggagtgagtgatgactgaaccaaaatggattactgaagccagaaaagaaatcggtgtatcagagcacacagcagcaggttccgcagctgtagaccagatgtggattgacagcaaactgcgtggactggttggctctgcgcgtaaggtgccgtggtgtgcaggatttgtgaatgcctgcctggaacgcgccggtattcgctcgacccgctctgattcttcccgttcatatctggcgttcggaaaaatgctgacacagcctgcatacggttgcattgtcacattctcccgtaccggtggtggtcatgttggctttgtggtcggtaagacagaatcaggtcaactgatggtgctgggcggtaatcagtcagatgcggtaaatatcaaagcattcggaaccgaccgtgttaccggttaccgctggccgtcaggtgttccggtggataatcgcccattaccggttggcaatgctgcgctgtcagtgaaagagtcgtgatatggactggctgacaaaagcgctggctggtatctgcgtggtgctggtcattggcctgctgctcattctgcatctgtacggcggtctgaaagataattatcaactgctgtcctctcagtttgctgagcaggtcgccatcaacaaagactacaaatcccgcatccagtcacttcacgaactggacaccatgtacacgcaggagttaaccaatgccaaaactgaaattgatagcctgcgtgatgctgttaagtctggcactaagcgcgtgtacatcaaagccgagtgttcaaagagcggaaccgataccaccgaaggcggaagcaatgaagccgccccacgacttagtgaagcaactgaacaggattattggcgtctcagagaaatgatagctgagaacgaaaagcagaccctgtatttgcaggactacataaagactcagtgcctcgctaaatagcggggctttttaatggctatataatgactcttttaattcattgacattctatttttttgaaaagtaggtacaatattgcaacttaatttcaaacctcaattaaaaataggaatgtgttatgggtgacgcccctgtatggatatctgcggtatgcgcagttgtggcggccgcggcaaccgtagtgactgctattatagcttataatgctttaaacgcatggagggtgcagaaagcaactgaaagtatagtgttatggataacctcagttgtcgattattctacagggataaagtttcttcctgacaccatagactataaaaataatagaggtgacgttgaagcggcggcaaaattaatgtatgaatgcataaaacgttggaaggccgctcagctttatgctcgactagatgaggatatgtatgcaaagttcatctctacttatgcgaaattatggattgatttaactgtagagcaccacactggttatataaatggaaaaaaaacaagaaaagaaacatttgattgcgctgtgaggctttataatactgaaatgaagtgacaatataatcaattacttgttgaagcgcggcaacgcaccaaaccaccttctggtggtttttttatgggtgaaatatgggtatccctaaatcatgtcgatgggataatagccggtatcgccttgtcgctgaacattatgacgaggctgtgccgctggtgacgtataagcattggctcaagtccaagcggcgctggcaatgcttcactgatgcgcagtcttccgttgaatggaaattgcagcaatcgaatttataaaactccacaaacgtcgcttgcgagtggcgttgatagagatttatataagttttcggctccggtggtatcggtgtaccacggacaaatacaaaacgaaccagtttattgttctgattgagtgaaaattatcaggattgcgttgggaaaagcgctatcatgcttagtcatatttccattcaattaagtggagtgaccatgatttactcaaatgtaaaaacttattacataagcgatgacgcaacgggaggtaggctggttcggtatgacgtaattaccatcagtagcgatgagtatctgataaaggtttttgatgaccagcagcgcggcatatctcccccgcattccattatcttggtcgatgagtttaagttcaccagaagcgaatacatggaaagaaataacattggcaacaatagtatgatccgtcgcgatatggctccgacatttgaaggggatattctcaatagatgccgggagcacaggaactcactcgaataacattacaacccgcttcggcgggttttttattacctacgagctgccgatctcctctgccacattagccacgacctgtgccactcctcacagcgagcgt

SEQ ID NO: 77 - DNA, 9858 bp, unknown
  Altogen 322075 strain
  misc_feature (7717)..(7746): n is a, c, g, or t
  misc_feature (7755)..(7762): n is a, c, g, or t
aaaggacggcacgacatatcacggattgatgacaacgaaagagccgcgcattactaacggactgattggcattgccggtctggatggctcatggacatatatcgcaccggatgaaatcagcgatatcagatacattccggttgctgaggaaaagagtaaggaataattatggctaagccggactggagcgagctacaaaaacagttcctgtctgaccatgccgctacagggatatcaccgaaagagtggtgtgagtctcagggtctgaattacgcaaccgctcgcagacacattaaaaaaccaactgcgcagaaaggtgcgcaaagtgcgcaaaccgaaacccgaccagtgcgcaatgcgcaaaagcgcaaagtaacaaattaccctccgtttgcaccaggtaacagagccgcagttaaacactctggatattcaaagtacatgcctgactctgacgagttatttgaggatgccgccggactggatttaattcaggagttgctttttatccgtgcgaggacgctttcagtaacaaaggttcttggcaaattacgcactgactttgagtcggcggaagatgccgaagtgcgcagcgaaatagcgcggcagctggtcaatactgaacaggcattagaccggaatatcgcccggatagagtcactggagaggactatatcaacgcttggcctggataaagaaaacctgcttaaaattatcgcagatactaaataccgcaaagcagcaacgaacaagattgatcttgaatcggacaaactcggccgcgaactggcggaggatgatgagaacgagacaccgacaccggttgcaataaacatcaacgtggtagacgcgagggtcagagaagatgatagcgccgacccttaatatccctcagtcacgatttctggctatgccgaataaattcagggcatatgttgccgggttcggctcagggaagacgtgggttgggtgcggcggcatctgcaaaggcatgtgggagcatccgagaattaaccaggggtacttcgcgccaacatatccgcagatcagagacattttctatcccactgtcgaagaagttgcttttgattggggcctgaaagtaaaggtgaacgagagtaataaagaagttcacttttatgagggcaagcggtatcgcggcacaacaatctgccggtctatggagaagccagagacaatcgtcggattcaagattggtaacgcgctgattgatgagcttgatgtcatgaaggctgataaggcgcaaaaagcatggcgtaaaattattgcccgtatgcgctataaggttgacggactgcgcaacggcattgatgtcaccaccacaccggaaggctttaagttcgtttatcagcagttcgtgaaagcggtacgcgataaacctgaactgacaacgctctacggtctggtgcaggcttcaacgttcgacaatgaaaagaatctgccagctgattacattccgtcactgatggactcttacccgccagagctaatcaaagcatatctgcgcggacaattcacaaacctgaccagcggtacgatctatcacacctttgaccgcaggctgaataacagcgaggaagaagagcagccaggggaaccgctgtatatcgggatggactttaacgttggaaaaatggctgggggggttcatgtgctgcgccttggattgcctcacgcggtaacagaaatcattaacgcctacgatacaccggatatgatccgcattatcaaagagcggttctggctgtatgcagatggtgattatcaaaaggtgcgtgaaatttacatctaccctgatgcgtctggtgaatccagaaaatccaataacgctagtgcaacagatctggctcagcttcggcaagccggatttaacgtggtcgtcaatgcgtcaaacccaccggttaaagacagaattaactcaatgaacgccatgttctgtaatgcaaacggtgaccggcggtataaggtgaatgttaagcgttgcccggtctacacggagtcgcttgagcagcaggtatgggctccgaatggagagcctgataaatctgctgataacgatcaccccaacgatgcaggcggttattacatcgtgaagcagttcccgatcattaagcgcccggcacaattctacttctaagaggcatttcagtgacaacaaaaaatgaagggctggaattgctcgtgaacagtgtcgccaatatggcggtgcaacgggctttgtatgcatcaggcggcatttccagcaacacgaaaagaacgacgctctatcaggagttcggatatccggcagaactgtcattcactgattattacaatgcgtatgaacgtaacgcggttgcacatgcagcagttcatcgcttgctggatgattgctggcaggacaatccgaccatcattgatggtgatgaatcgaaagaaaacaaggaaacaacaccgtgggaatcctcggttaccaaactgctgaaaagattctggccgcgaattaaggatgcagaccggcgcaatatggtcggtcattactcggcattggttatccagttaaaagacggcgcagactggaatgagccagtagataccacagaggttaagcgacttggtgaaaaagcgctggttaacctgatcccgttgtgggagccgcagttaaaagtaactgaatgggaaacggatatatcatccgagaactacggtaagccgaaatattacgattttgatgagcgacctgtcgggcaccagattcacggtccgataaagcaaaagaaaatacatccagaccgggtgatcattctgtgcgagggcgcggatgatgattatatgttttctggcatcccgctattgaaagccggattcaacaaactgctggatatcgaaaagatttccggtggcagcgctgagggattcctgaagaacgccagccgccagattgctgttgagtttgatgcagcgactgacatggataacattgcgcaggctgcgaagaaggccggttatgatgatatcgggtccgcaatggccgataaggtagacaaacttaatcgcggtacagattcagcagctgtgatgcaggccggtcgcatgaatgtgctctctgttgcagcggctgatcccaatccatcatgggaagtggcggttcgtgaatttctgaccacaatacgcatccctttttctgagtttctcggaacgcaaaccggcgtactggccggggataaagatggtgcggcatatggtaaacgcctgaacggtcggcgctggggatttcagacaaagtatgttactgaaatcatcggtcgcctgtgtactcttggcgttatttcgcaaccagagtcaggtgatatcaccctggcatggtctgacatgctggcaccgagtgaagctgacaaaatcgataacatgatcaagatggcagatgctgcgtggaaatcacaacaggcattcggcatggcgatatttaccccgaatgaaatccgcgcagttggtgagcttgaaccaatcgaagatgatgcgccaccggaaaccggccccaaaggagacccgttaactgatgataaagaaccagagaacagggtcgccgataataccgagaaataaggcggacccgacacagtcaggaaggtctgtcagaaagatgtaccgcgatattgaaaaacggtatcacggactgaaaaaagcactccgccaactgttcgatctgtcgttcaccggcacggagcgaaatcagaactcactctacagctatatcctcgctaaaaacgcacagaacgaaccagattcgcttatcagggttaacgctggggtttatgtctatgaactcgctgagcggcctgatgagtacgcgcggttccttgaacggctgcaatctattctggatgagtacctgcttgagggggggaatgaaaatctgtgggcgttcagccatgttgcggcggaatatgatcgcggcacactgaatgcgtataccaatctgtcgttgcagtcagaggtgtacgcatcacagaccacgctcacttacctgatgtcgcagcctgcataccagaaccagatagccgccacgtttatctcaacgttcagcgattggaaaggtatttctgatgccgcgcgtgccgacctgtcgaacatcatcggcacatcgatagccaggggcgtcaatccgcgagaaacagccagaatcgttagccaacggctggatgtctcaatgagcaatgcaaagcgcatagctcagacggaacaggtaggcgcgttacgtcgtgcaaactggaatgaaaccacatgggcgagtgagcggttagggctgagcaccggtctgctgtggttatctgcactgaaaccgacgacgcgcagttggcatgcagcacgacacggcagggtgttcactgttgaagaggttgaagcgttctatgctgacggtggtaaccggtttaactgctactgcgcgacacagccggtattactgaatgacgacggaacgatttacaacaaaggcattactgacaggctgacagcagagcgtaaagcctggtcaacagacgaagattcataaccaaagaggccactacatgaagctttcgggtattcatgttaaatcgctggctatcaactcctccaatatctcaactgaaatcatcgacggtgacgaacatatcgtcattcgcggcgttgtgcctgtcgttgatgacgttgtgatgaacggggggctatatccggccagcgaaattaacaaaagttttcagtcgatggaggggcggcagtgcccgtacggacaccccaagatcggcacagattacgtatcggctgacacgccgagagcagtaaaccagtttcacatcggcgcatgggctgagaatgtccgcaaagatggtgaaagagtcgtcatggacgtgaaggtcaaccgacgtttcgcggatgccacagagaaagggaaagagttccttgcccgtgtggatgacatcattgccggtaacagcacagacccgatccacgtctcgaccgggttgctgctacagcgcgagcagaacaaaggcaagtcaaagggtaagccgtatacatgggtagcccgaaacatgcactttgaccacatcgccattcttccggtgggtgagcccggcgccgctacacctgatgacggtgtcgggatgttcgtcaacgctgacgggcagaaatgtgatatcgaaaatgtcagcctgattgatgctgcgaactgtacgaaagcggacattctcagcaaggtgaaattcttcttcaccaacgggtcaaatctctctttcgatgatatccacagtgcattacgtgctgcattaaggtcgaaatttcctgatgacgactggccttatccggaaacagtctggcccgacaaattcatttactacaaaaccggcaaaacctaccagcaaaaatacctcattgacgacaacggcgaagctgatcttgtcggtgagcccattgaagttgtgcgcaagccaacagagtacgaagtaaaaaccaataaggaaaacgacccgatgaaacaactcatcacaaacgcgctgaaggcaaaaggcatcgacacagacggaaaatccgatgctgagctgatggatgcgtacaaccagatgattgccaatgaatcaaaaggcgaagaaacgccggaagagaaagcggcgcgtgagaaagcagagaaagaggccaaagacaaggccgctaacacagatgacgtcaccgcagcagtgaatgccgcactcaagccgctcactgatgaaatcagcgcacttaaaagtcagttaaacgcaaacgctgataaagaaaaatcagccatgcgtgaagcggtgaaatccaagtttggcttctcagaaacgacggtgaatgcgctggacggcgacccgctgaaagaactgtatgcacagtgcgcaccggttcaggggctgaatggctcgttccattctcagcagaactcttccacctcagtatcagaaatgccggagtaaaacgaaatggcgaacaaaacaaaacgtgtgattcatgcgggcggtatttttcctaacccgctgttaaatcgtgaaggcgaggcgttagcagacattaagcccggcacggtaggctttttcgatggcggcaagttcaaagcctcagtagatggtaaagagtcggcaatcctgtatgtggcaaacatagattatctgcgctgcaaaggtgtagatgacgacctgaaggccggtgattgggtggttgcaatccagccattgcagggattattcctgaacgtccgcgctgctgccggcacgtacaaaaaaggccagccggtgattgttgccaacggtcagatcacagcggccaccgctgcggaaggtgaagttgtattcgcctatgtcgaagaagattcagcactgaccgctaaggcgggtgagctggttcgcgttgtgttcaagtaaggagaaccgaatgttttatttttcaaccaaaaaagcgaccgaaaccggcaaccttgaagcaaatacggcgcagtttggcgaactgcagattgcccgtgacgcatcctcacaggctgttgctgagttcattatccgtgccaattcacgcggtaacggcgcaatcagagttgatgccgctaacgcagttgatgatatccgccgcctgtataaagcatatgaccagactgttctgtccgagtttcagccgaataccgagtttaccctgctgaatgacctgatggggctttcccgctccgtgcgtctggaagaatccgtgtatgaatatgcccgtaaaggcagtggtggcgtggctcatacgtcaatgtccggccagattggtgcgttactggatgccggtgcattcacctttgacggtacgatggtgccgattcacgataccggctttaagtttggcttccgtgacccgatcttcgcgaaaggttccgcgctggcctctttgtccgatgcacagtctgattctgttgatactgttcgccgcaaatacgttgactttatctggaacgggttccgtgattccgaaggtaatttcatcaagtttgatggcaaatcatggaagggcttccgtgctgatgagcgcgttgcgcaggtgacactgactgttaactttgccaccgagcaggacggcaaggtgatccgcgcagaaatcatcaaactgcgtgatgtgctgaaactgaaaaacaaacaatacggtgagcagacctggtatgtgtcaggtgaaatcctgtcaaattgggaaagcgtgtatttcgatgtgaaccagacccgcaccattctggaagaggtgaagaaaatcaccggcatcaaagacatcaaagaagattgcgagctgaaagacaatgaaatgctgatcgtgccactgggtgccggtgttatcgctccgattgtcggtcaggcgttcggtactgtcgcagacccgcgccagttctataactctgattacgtatggcgcacatggggcgctgccggtctgatggttaaacaggacatcagcggccacttctcagttgttcacgcgaaaggcgcataagggggatttatggcactggtaaaagtagtttcaaataacctcttcgccggtgccggtttccagcctgtggaagccggtagccaactgacaatgtcagatgaaagcgcgaaagaatgggaaaaggccggtctggttgagattatcgcatcgggtgatattgaagtcgcatcgcctggtaacgatgattctgaacagcctgaacagcctgaannnnnnnnnnnnnnnnnnnnnnnnnnnnnncagcctgannnnnnnngcagcctgagcagccaaaggcaaaacctaacggtaaaaaataatgcagataactcttgatgacgtaaagccgatgattgcggaactcgggtttacattgcctgattctgtgctgtcgctgttactgagtcaggttaatgcaaagtccgggtgtctcgaagcaaactacgacgaaaccacgcagaaactgctgctgatttacaccgctgtccggttggcctcgctgtctggcgcacgaaagatatcatcacagagcgctcctaacggagcgtctcgttctttcgcatatgattctgccggtactgattatctgcttaaccagatccgcgcatgggacagtgccgggtgtctctctgatttgccgttgtcgagcaaaacggttggcttcttcggtgtggtcggggggtatcaatgagttcagtcgctaattgggcgtacacctcatgggctacgttgtggcggtctgccggtaaagataaatacggtaagccaacattttcggagccggttcattttctgtgtggctatggtagtgaactgaaagccggaaagattgatatcggctctgaaatcactatcaaactggtattctggactgagtacgccaatgcgaagaaaggtgactttatagctatcggcaagcactcgggcgatccggtttctgctggtgctgacgaaatcaaattcatcaaacgtgatgaggatgtatttgagcacatagcggacgactacaccctgataacggcggtgtgatatggcggcaaaaatcagaggtatcgcagaggtcagcgccaatatcaatgcactggtcggcaatatcaccggtcgcaaagtcacccgcgcaatacaggcggcgatgctgattggtggtgctcaggccacgctgttcacgcctattggtgacacatcaactctcattaactcgcagttccgtgaaataacagtgaacggcacccgcgttaccggccgcgtcgggtattctgcgaactatgcggtatttgtacatgacccgaaagttaagcagacattccgtcgtgccactgcgcgaaaagagttcctcacgctgggatttgaagagagtcgcgatgagattgaagcagccatgcatcaggagatgcgcatatgatacacgaagcgtttgagcgttatctgaaccgcgctggtctgctggatgatttcactgttcagtatctgacatggacggaagaacctgagtcacgcacgcagcaatatgccgttattcagccggacggaggcagcggcagatttgctgaccttggcgcagatgataacgtgatgctgattctggtatctgcacagaatgatccggagccggtgttaaccagggcgaatgacattctcagtttcgtggccgagtttccggatgattgcgaactcaactcagtttacaaccttggcggcatgccgaagccggtgccgacagaagaaggccggttcatcatgcaattggctttccgctgtacatcctgaacaaacacacttcaaacaggccgcatatgcggccttttttatttgcaaataaagaggttacaacatggcacaatgccctgatcataaaggcctggtgatgggtaatgcggggattctccgcattgctgatggttgctcaagcccaatccccgaccagtccgcatttctgcgcctcggcgcactgaccagtaaaagcctggattatggtactgaaacggttacttccaaagcagacgacacaaaagggctgacagaggccatcgttaccggtgcggatgtgactattaaatttgatggtgagattaagcgcaagggcgttgacggctctacatctgcgtttgatatcgcaaaatatatcatggaagaaatcaaggccggccgccagccgtcgaagtgggttcagctggacatgaaaggggatggcagtggtgtgattcagggggacatgaacttcacatcatggtcgatggagttcccgactaaagaaattgccacctattccggtgagctgaaaattgccgacgctgacagctttgagtggttgcaggaagaaatcgtggtgcagagcatcaccgccaaccctgcgacactgactgtgaaagccgg

SEQ ID NO: 78 - DNA, 54199 bp, unknown
  Altogen 322075 strain
aaaaattaatctgctaaatcatctggtttgtgccatgcggcaaccgaagaaaatcgggagcctgattctgccacagtgatccgactgataccgtacaaaacgaaaagacgctgtcacatccttgttcgctcggttcgcgccatccctggcgctctacgcttttcgctcttctgtacggtatctgccgtgtacataaagtctggcgtaaataaaaacagattttctgagagcagccaacgccgctacaaaacaaagagacgcgttacgctaaatcattcgctctgtggcaaggtggcaagggaagaattccggggagcatacaccagtatgtgacccggaattctgagtgcagccaacgcagccacagggcgaaggatgacgcgtaatcagaaattcagtttcagattagcccaataccggcgcccttcatcgatctgccagttcccgttagtctcgatatcatcccctttctcgttggcgatgttcagtactgcgaagttcagcagagcgtttggcataacctggtaggtcatcccgaggtcgagggtggtgatcccgctgcgttcacgcggctgttttgccccgttacgctgtgctgcccagacctgtttgccggtgtagtttgcctgagtgtagaagttcatatccgggcagaactgccagtcaagtttggcattcgccatatgacgcggtgtcatttccagcggttgtcctttcagggatttaccgttgagtttttcgtcgtcactcttacgttctgaatcggtgaaggtgtagttcaggttcagattccatttttctgccaccggaatacgggaagccatttccacaccacggatattcgctttacctacgttatcgtagataaacatgttcaggccggtcagcggatcggtttgaccggcgacctggtagctggtcagcttgtttttgaattcggtgttaaacagggttgcactggcagagaaaccggattcatggtcataagctatacccagttcttcggtgacgctggtttccggtttcaggtcacggttaccgtacatgatagccgcaccaccttgtgtggacgttccgaaattcgggcttaactcgcgcagtgtcggggcacggaaggctttcgccacgccacctttgatggtgatttcatctgtcagcttatagacggcataggcacgcgggttccagtgtttaccgtagaattcgtggtcgtccatacgcagaccgccggtcagcgtcaggtcgtcggttacactgaattcatcttccacaaacagcgctttctgctcagcagtcattttttcagtgacggtctgtttgtttttaatcacggaatcatctttcagtttggcatactgatattgtccgccgacggtcaggacgttagacggcaggaatgcagtgacctttccgtcaaccacggtattggtgacttccggctggcgggcttcatacgccatgatccagtcttcactgactttattccatttgccggtattggttttacggatggtattttcctgatacacactcacttcactgttaatttcatcccagtcacctttccaggtcagcgcccagtggttacggttgttgtgtacttcggatttgttattcttctggacgataccgccacgggtagctgtctcatcaatcgatttccccggggtggatgtatgctcctgcgtactacggccgacttctgcaaggaatttctgcccttcaaccggcgtaaaggccagtttggcggtgatatttttatcgtctttacgtggtgtaccttcctggaggtggtcttcgcggcgatagttcagcccgccgtacacctgtaatcccagcttgtctttaatcagcggtccggagacatagaaatccgtgtttgcggagttaccgtaatctttactttcctgaatgataccgcccatacccattgagccgtgccattcgtctgccactgctttagtgatgatgttaatcacgccgcccatcgcatcggaaccatacagagaggacatcggtccgcggatcacttcaatacgctcaatagcttccaccggcgggataaacccggcttcgtaaccgccgctgccgttcgggcgggattcacgactgttctgacgacgaccatccaccataatcagggtgtaatccccggacagaccacggatgctgatatccggcttcagactaccgccgatcacactgacaccttccacatctttcaccatgtcaatcaggttggcagccggtttattttgtaactgctccttggtgataacggtaatactcgctggtgcatcgcgcatttcctgcgcaaaaccggaagcggtaaccacgatggtgtcatctttattttcagcataagcggcggtggccgctgacataacagcaacagcaagcagtgagcgtttgaatgaggcgttcatattattccctgactggattgatattttttatttgaaatactaaatgagaatgattaatcctatcattgatatatgctattgagaatatgatcgcaaatgaaaattattatcacgatgataataaattgctgtgacatcgttaaaccggaaagtacagctggagagtaaacagcaggaatgaaagtcgcaggacaaaaaaaatgctgcaaattcaggtgaatttgcagccttctaacaaagtaccaaagtaaatagtgagggataactaataaataaaattaacacattctcgtcaggaaaatctgctcatcaccgagtgacggagaaccagagtcggcgtgtaacacggcggacaaaacggcagcgcctgtgaggacgccagcgccagtgccagctgtgttgctgtctgagccatcatgtcaacaggataacgtattgtggtcagacgaggttggatatatcgtgcgatcatgctgtcatcaaagccgataacagaaatatcttccggcgcgcgcagcccgttcgcctcaattaccgacagcgctcctgccgccataaaatcgttgtacgccaccaccgccgtcaccggcagcgataatgacaaaacagcactcattgccgcttccccgccctctgccaccggttcaccaacggcaatgtaggcctccggcagctcacaaccggcttctgtcagggcatctctgtagcccgccagccgttgcgcgctgtcttcaatcgtgtgtgatgacgataagcaggcaatatggcgatgcccctgtttcagcagatattgtgtggcaagctgagttccgcgccggttatccagagcaacacagcggttttccagccccggaatcatacggttgataaagaccatcgacggcatttccgctgcatagccgcgcagttcttcatcactcagtgctttggcatggatcacgcaggcatcacagcggctgttcatcagtaattcaataccgcgccgctcatccccctgccggtgataaccgttgccgattaacagatgttttccgtgctgatgcgccacctcatctgcggctttgaccagtgaaccgaaaaacggatcggacacatcccccaccagcacgccgacaatatcactgctctggctgaccagcgcccgcgccgccgcattcgggcggtaagccagctccttcatggccgcctgaaccgcacggatggattccgcacctgctttcggtgactgattgataacccgcgagaccgttgccactgagactcccgccagttttgcaacatctttaatggttgccatttaccgctccgttattgttttgtgatcccggtacttgccatccggtgtaactctgctaatttttattatcttttactaaaattttaccggattttactatggaaactgtcacttaccctgatttcgctaaactggagatccgcaccggccggatcacggatgtcaaacgtcacgaaaatgccgataaactctatattgttcagataaatgtcggtgaccgctcacttcagaccgtcaccagtctcgtgccgtattatacagaggaagagttactgcataagcaggtcgtggtgctgtgcaatctgcataaagccaaaatgcgcggcgaaacctctgaatgtatgctgctgtgcgccgaaaccgatgacggctcagaaagcgtcctgctgaccccggaacgtgtaatgcctgccggtgtccgtattgtctgataaagcaaagtttgtcaacggcctgagtggctcaccgttgtgagccactgatttaaaacacaaaccggtatactgtcacactctcccgctgttcccccgccgctgaaattcccctgaccgcatccggccagtgcgggtgattcggcccgtccgggaagtactgggtctccagcgccagcccggcataatcctgataatcgccgtgttttcccggctgaccgccgagataattgccggtataaagctgtatgcagggcatggtggtcgccacttccagacacacatcccccgccggtgaccagtacgctgcgacggtctgtttaccgtcacacaatgccgggtccggcacaaaggcgtgatcaaagccttttgtctgctgctgtgccgcctcagacataaaaccctgtgacagcggcctgcgggtgcgcaaatcaaacacagtgccggccaccgggcagaacgtcccgtccggtaagttatctgcattcagccccagacgtttgtccgcccggatctgcatttccccttctgtcaccttcacgccgctgttttcaccggccaggttgaaataggcatgattggtcagactgaccggacaagctttgtctgtttgtgtccggtaagtcaggcggacttcgttttccggcgtcagctgataagtgacttctgcactgagattgcccggaaaaccctggtcaccatccggcgactgcagggaaaatgttacggaatccgctgaacgacggcggatctgccagcgccggtggctgaagttatccgttccgccatgcaggcaggtggtgccttcattgcaggcgagcggataaaactgcccgttcagggtgaaaccaccgcccgcaatccggttggcaaagcgcccgaccgtcgcgccgaaataggcggtctgacgggcaaatccggcgctgtccgccacaccgcacaccacatcccgcatcccgtctgccagcggcaactcacagctgagccaggtcgcgccggtatcggcaatactgatgcgcatgccgttgtggttggtcagaaccactacctccgccggtctgccgtctgcggccggttcggttgccagcgcccgttcataagggcgctgctgcatatgtgtcatattgcctccggtcagcggatcacaccggcgccgtcactggcacggcagacataaatatccgctgtcagccctgagatcgccggatagtgtgcgttaatcgcgtctgtaaccggcacgacatgttccggcttcaccagcgcgaccacacaaccgccgaagccgccgccggtcatacggacaccgccttccgcgccgataacatcaccgataatcgtgaccagcgcatcaatttcaggaaccgtgatttcaaagtcatcacgcatggagtgatgggattccgccatcaactgactaaggcgcggtaaatccccgtctttcagggcttcagctgccgcaagggtgcggatattttcgctgatcacatgacgggcccgtttcgcggtcaccgcatccagctcatgagcccgggcggcgaactgctccattgtcacatcccgcagcgccggaacgccgaagaattccgctgccgcctcacactgacgccggcgggtgttgtattcactgtccaccagcccgcgttttttgttggagttaataatcatcaccacactgttttccggcatggcaactgcgcgggtttccaggctgcggcagtcgatcagcagtgcatgcccctcttcaccacaggccgaaatcagctgatccataatgccgcagttacagccgacaaactggttctccgcctgctgcccgttcagggcaatgacttcacggctgacgggtaaatcatacagggctttgacagtctggccgatcaccacctccagcgaggcggagctgctcagacccgcgccctgcggcacattgccgctgaccgcaatattcatcccgccgaacacaaaaccgcgctccgccaggtatttgaccacgccgcggatataattcgcccacaatttattgtcgcggtattcgatcggctgtgagagatcaaactcatcgcgatcattatcataatccgcagccaccacgcagaccttctgatcatcacgccgcgaggcggccgccaccgtgccgaaatcaatggcacacggcagaacaaaaccgtcgttataatctgtgtgttcaccaatcagattcacgcggcccggtgcccggatcagcatgtcaggggatgcaccgaagcactgttcaaaggcatgttgtgccttgctgataactgttttcatcggaaacctcagattataaaggggttttaaaatggtggtcgctgactgcacgcagccgctctgcggcctgctccggtgtcaggtcacgctggctttccgccagcatttcatagccgaccataaatttgcgcactgtcgcggaacgcagcagcggcggggaatagagcgcatgtaactgccagtgatccagcggttcgccctgctgaaaatacggcgcaaaatgccagcccatcgagtacgggaaggcacagcggaacaggttatcgtagcggctggtgagttttttcagtgccagtgcgaggtcatcccgctccgcatctgtcatggcttccatccgggtgatcacactgtgtttcggcagcagcatggtttcaaacggccacgccgcccagtacggcactaccgccagccagtgctccgtttccgtcacaatgcggctgccgtctttcagctccgcctgtgcgtagtccagcagcaggttactgccgtgctgacgggaatagtcacgcagcagtccgtctttgcggctcagggcatcaggcagaaaatcactggcccagatctgaccgtgcggatgcggctgcgagcagcccatcagttcccctttgttctcaaacagctgcacccagaggtatttctccccgagttcctgtgcctgtgcctgccaggtatcaatgacggcgcggatttgtgccaccggcagttccggcagagttttgctgtgatcgggggaaaaacagagtacacggctcagcccgctgacggcctgagtctgaaataacggactggtgttttccggctgtgtgcagggctgcggtctcagagcggagaaatcattctgaaaaacataggtgccggtgtaagcaggattaatatcgccgcttacccgggtatttcccggacacaaaaagcagtccggatcataagccggtaaatccgccacatcagcgacttcatctctcccctgccacgggcgttttgcccggtgaggcgagactaaaatccactgtcccgttaacgggttatagcggcggtgagggcaatcagacggatcaaaagtcatcatagacacaattctctctgacgatgaaacgggttagcgatgattgtcctcaggcgttaccggttttcgtctttcgtcagtctgcgtaaccttccgggttctgctgctgccagcgccaggcatcctgcgccatatcatcaacagtacggacggcccgccattgcatatcgcgggccgctttatccgggctggaccagcactcagcgatatctcccggacggcggtcacagacagcatacgggatcggtttaccggccgctttactgaacgctgcgatcatttccagcacactggtgcctttgccggtacccaggttatagatatgcagcccggaagactgtgccacggttttcagtgccgcaacatggccgtccgccagatccatcacatggatgtaatcacgcaccccggtaccgtcaggtgtagggtaatcgtttccatagatactgactttttcacggcggccgatagcaacctgagtgatatatggcgtcaggttattcgggatacctttcggatcctcacccatcgtacctgtcggatgcgccccgaccgggttgaaataacgcagcagtgacacagaccagtcattatccgcgatcagcacatcattcagaattcgctcaaccatgtatttactggtgccgtaagggtttgtggtgttaccgatagcggattcttcggtgatcggcacactggccggatcgccgtacacagtggcggaagagctgaaaataatccgtttgacctgtgcccgcttcatgctgcgcagcagaaccagcgtgccgttgatattgttatcataatattcaaccggtttttccacggattcacccacggctttcaggcccgcaaagtgaatcaccgcatcgatacggtgtttggcaaatacgctgtcaagaaaggcttcatcacggatatccccctgataaaacacaggttcttttccggtaattgcagtgatccgcgccagaactttggcattggcgttacacagattatccacaataaccggtgtcatgcctgcattcatcagctgtacgcaggtatggctgccgatatagcccataccgccggtgacaagaatttccacatatacctctcaggctttgtaatgtattcagagaaaaccaaagtataacgtgaggacggggaagattctaaccatgaatagtttttgagtctgtgatactgatctgatttgtgtaaacgtttacactaatacgctgaatggtttttactaaaagtttctgtgctactataagcagctgttactgcctgaattacgcctgttgccctgccgcagttcccggccggaggagaaagaacacaaaaatggccacgctaaaagatatcgcccggcaagccggtgtctcactcgcgaccgtgtcgcgggtgctgaatgacgacccgacactcagtgtgaaagaagaaaccaaactgcgtattctggaaatcgccgagaaactggaatacaccgtttccgcgcaacgccgtcacacaccgggcaaacgtcaggcacagcggctgcattttctggcggtttacagctatccgaaaacagcggaaattaatgatccttattatctctccatccgccacggcattgagttacagagcgaacggctgggtattgagctgacgcacgcttatgaaaacaatctgccggagacagtctcccgcccggacggcgtgctgctgatcggacacggtgcccgcgcggtactgacagaagtgcaggcactctgctctgccgtctgctttgtcgatttcagcgatcgccagagtgattatgacgcggtggatattgacctcgcgtacattgcgcaatccgtaaccgatttctttattgcacagggttatgaccggataggttttatcggcggacaggattccccggcggcggcagatatccgcgaagtcgcatttacggaatacggctcactgcgcggtgtggtgcgcggggaagatatctatcgcggggatttctccagcgcgtccggttatgctctggcaaaacagatgctggccaaagagagctatccgaaggccctgtttgtcgcttctgactccattgctatcggcgtgctgcgcgccctgcatgaacagcatatcgctatcccggaggatatcgctcttatcagtgtcaatgatatcccgaccgccaaatttactattccgtcactgtcgaccgtccgcatccactctgaggtgatgggcagccagggtgtgaatctgctgtttgaacgtctgcgtgacgagcggcaggagccgcttcaggtctttgccgcctcccgccttattctgcgcggcaccacgaagtaacacaccttccgtaagattctgacggctgccctcaccggcagccgtttttctttcagtaaaatttaccttttgcaaagatgactgccttttacacaatttagcgtttcagctcacaagattgtgccgctgttgtgcggattatgtgatcaggttaaacatcttagttttaccttatagtttttagtaaaacttttactaatatcccgttaatgattgatctcatccgatagcccgcagtaattgctgactataaagaaggagcttctgtgaataactgggaaaactacaccctgctgcatgaaaatcgtctgccgccgcgtgcctatttctttgcctatgataacgataccgccgcacgcacttatcagcgtgagctgagtcagggttttaaactgctcagcgggcaatggcagttccgctattttgatcatccgctgcgtgtgccggaggcgttttatcacacgccaatgacagaatggtcatccatcactgtcccgaatatgtggcagatggaaggccacggacaactccagtataccgatgagggctggccgttcccgattgatgtgccgtttgtcccgtcagataacccgaccggtgcctatcagcgcacgtttacgctggatgaaaactggtcacaacaacaagtcattattaaatttgacggcgttgaaacctattttgaagtctatgtgaacggccactatgccgggttcagcaaaggcagccgcctgaccgctgaatttgatatcaccgtatttgtcagcaccggggaaaacctgttatctgtccgcgtcatgcagtgggcagacagcacctatattgaagaccaggatatgtggtggatggcggggattttccgcgatgtgtatctgattgcgcagccgccggtacatgtccgtgacctgactgtccgcaccgattttgcgccggattaccgcagcgccctgctgaccgcctctgcggaaatagccggctcagcagaaggagtgcagattgaggccgttttatatgatggcagcatcgtctgtttttcacagaaaaaagcgctgactgctgacgatcataccatcacattcaccgcagatatcgcttccccgcgctgctggagtgcggaagatccgtatctgtatcacctgctgatccgcctgtcagacagcaacggcaatctgctcagtgtgatcccgcagcgtgtgggattccgcgatattaaagttcgtaatggcctgttttatatcaataatcattatgtgaaattacacggcgtcacccgccacgataatgatgaacacaaaggccgtgctgtcggcatccgccggatggagcaggatctgcggctgatgaaacagcacaatatcaatgctgtccgtaccgcgcactacccgaacgatccgcgcttttacgagctgtgcgatatttacggcctgtttgtgatggcggaaaccgatgtggaaacccacggttttgccaacgtcggtaatctcagtcagatcactgatgatccgtcctgggagccggtgtatgtcgatcgcatccgccgccaggtgcatgcacagaaaaaccatccgtccgtgattatgtggtcgctcggtaatgaatccggctacggctgtaatatccgtgccatgtatgatgccgcaaaagccattgatgacacccgcctgatccactatgaagaagaccgcgatgcggatgtggtggatatcatcagcaccatgtattcccgtgtgcagatgatgaatgagttcggtgaatatccgcacccgaaaccgcgtattatctgtgaatatgcccacgccatgggtaacgggccgggcggactgagtgaataccaggccgtgtttgaccgtcatgatgccattcagggacattttgtctgggaatggtgtgaccacggcattctggcacaggatgaacagggtcgtccgttctataaatacggcggtgactacggcgattacccgaacaactataacttctgcatggatggcctgattttcccggatcaaaccccgtccgcagggctgaaagaatacaaacaggtcatagcaccagtgaaagtgcgcgattttgatgcgaacagcggcgaaatcaccattgaaaaccgtttctggttcagtacgctggcagagtgtcagatccgcgctgaatatattgctgacggcgatattattcacagtgaaattttatcgctgcctgaactcgctccccgcgaaagcgcccgcgttgccctgaacttaccggctgccgatggccgcgaaatgtttgtcaatatcatcatcactcgtctgaatgccacccgctacagtgctgccggacatgaaatcgcggtttatcagttcccgctggcggcggcatccgcgccggtgctgccgtttatccgccatgatgccacgccgctgacagtctgtgacgagcggctgaaaatgcatattcacggctgtgatttcaccctcaccttctcaaaaaccgacggtaaattaatccgctgggaaaaccgcgggcaatccctgcttgccgccgcaccacggatgcgtttctttaaaccaatgattgataaccataaacaggaatatgaaggtttatggcatccggcacacctgcaaatcatgcaggaacatttccggggtatggaaacggcacaggaaaacggccatgtaattgtcacggtgaactccgtcgttgccccgccggtgtttgatttcggcatgcgctgtacttaccgctacaccattgcgccggacggccatgttgcggtgaccctcagtggtgagccgtacggcgattatccgcatgtgatcccgtgcatcggcatggatatggggatcgatgcccgttttgaccacgcggaatactacggacgcgggccgggcgagaactattcggacagctgcaaagccaatcttatcggccgttatcagtcaccggtcagtgacctgttcgtcaattatccgttcccgcagaacaacggtaaccatcaggacacccgctggctggcactgacggacaatcacggcagcggcctgtttgtgcgtcctgatcagccaatcaatttcagttgctggccatgccggggggaagaactccaccgtgcacaacatcagcatgaatggcagccggacagccatatcactctgaaccttgatcacgccctgaccgggctgggctctaactcctggggcagtgaagtcctcgacagttaccgtgtctatttccggccgttccgtttcggattcacactgctgccgtttaccgaaggcgactgccgtgcggaaacactggcaacactgcatttttcaggcgaaacacactcaggaggccgggcatgatcctgtttactgatttaacggattttcagcgtttttttcgtcagggcaaaaaatggcagcgttgtattgaggccatcaataacctgccgtccattcatcctgatgtggcctattctgtcggtgattcactgatataccgccttcagactaaagcagagccgcagccggacttcctcggtaaacgccgttattttcaggtgcattactggctggagggggaggaaaacgtggagtatgccgccaaatccgccctgaccccggtaaatgcctacagtgatgaaactgaccgcgaaaccctgcgcggtaaaggggaaacgcagatctgcaaacccggcaatgtgctggtgtgtgaaaatcacgaggcataccggttcacctgctcaggcgatgtccgcaaagtggtgcttaccgtgaccattgaagacggttatttcctgaataaataaatagttaataaataaatgtgcggggaaccaccccgccttcacccgacaaaacagggctctgtacccgcccgcgtcgagatccacggagaacgctatgtccacatccgcgcgtaataccatcggcaagttcggactgctgtccatgacctttgccgctgtatacagttttaacaacgtcattaataataatatcgagctcggactggcctccgcaccgatgttctttatcgccacgattttctactttattccgttctgtctgattatcgcggagttcgtctccctgaataaaaactcagaagccggtgtttacgcctgggtacgcagtgccctcggcggtcgctgggctttcctggccgcctatacctactggttcgtgaacctgtttttcttcacctcgctgctgccgcgcgttatcgcctatgcctcttacgccttcctcggctatgaatatatcttcacgccggtcaccaccgcactgctcagtacggtgctgtttgctttctccacctatgtgtccaccaacggggcaaaactgctggggccgatgacctcagtcacttcctcgatgatgctgctgctgaccttctcgtatatcgcactggccggtgttgcgctggtggggggaattcagcctgcggacccgattacagtggaagccatgacaccgaactttaactgggcattcctcgggatcactgcgtggatctttatggcggccggaggcgcggaatcagttgccgtgtatgtcaatgacgtcaaaggcggcagtaaagcattcgtgaaggtgattattattgccggattattcatcggcctgctctattccgtctcctccgtggtgatcaacgtgtttgtaccgcgtgaagcactgaagtttaccggcggctcggtacaggtctttgaaggattatccacctatttcggtctgccggagatcctgatgaaccgctttgtcggcgtggtctctttcaccgccatgttcggttctctgctgatgtggaccgcagcaccggttaaaatcttcttcgcggagatcccgaaaggtgtctttggtgccaaaaccgtggaactgaacaaacacggcgtaccggcgcgtgccgcctggatccagttcctgattgtgatcccgctgatgtttatcccgaccctcggttccgataccgttcaggatctgatgaacactgtcatcaacatgaccgccgccgcttctatgctgccgccgctgtttatcatgctggcctatctgaatctgcgccgcaaactggatcatatcccgcgtgacttccgcatgggttcacgcaccacggggattgcggtggtttccctgctgattgtgattttcactatcggcttcctggcctccaccttcccgaccggtgccaacattgcgaccattctgttctataacgtcagcgggatcctgattttcctgggctacgcctggtggaaatacagccgttatgagaaaaccctgaccgcagaagaacggaaaatcgccgatgccccgaccgcgcaaaccgcgctggcccgtggcgaagaatccgtcgataatatctgattatcctgcagatactgaaaagccaccggacggtggctttttgcatttatgaactgctgactttatgtaacagggtgatgaccggtaaagaaatgaaaagcatgcgagccatggatggcgagcctgagcttacagggacgtattcacagcgacttttcatttttaccggttatcgccggaatcaccggtgtcacaatccaccttcatgctatcagcgcggtggctgtaactccgccggtacagtatctgatgttttgatcagattaataaaatcaattccctgcgggctgaaaataaacaacgcataaccggtggccattttaatatcatcgttgcggacaattcccggaaagcccggcatcggcccgcctttttcaacctgcttaatcagccccacctggtcaatcatcacactgcatgccaactggccgttcatctcttttttatccatccgcaccatatcgccctgatacggacgtgaggtgaaatgatcaacgccgtttttgtcctttacgcccacaccatattgattggtggatttatccagcagcgtcagggcaatactctgtgattctccctgcagcggcagctgataaacaccggtgaaatccgggcagttttcctgtgtctgcgccggtggcagaggcgcggcacaaccgctgagcaaaatcgggagcagtgcggttgccagccagagtttgtgcgtcataaatatccttttgtcagtgcattttccggagccggaacagacacaaagtctatcacagtttcccccgcatccggaaaaatgccgcagaattgccctactttaccttatcccagcgcaccagactttctgacaacaccgccagcaggatcgccaccagcatgccgttccccagcatcgggcgcagcagcaccggcaggtcactgataaagaccgcaggcggattaatcagaaaaataccgacgaacaacgggatcgccagccggtaaatattgcgcgcattcagggaaattttatccacgaaagccagtgaggaaaacatcagcggcagataggtcgccagcatcacagcactgccgatagcgagcggcaacccgctgaagaaaagtgtcaccggcgggatcagccccatcagcagaaacagcacactgccgaccaccagagatgtccggctgctgtcattggtctgggtgattaatcccaccgaggagacaaacggtgcaaacggcactaccgccagcggcgcagtcagcagtgtcaccgagccggtgacaataaaactgcgccggaacaggacattattttcctgcagtttatccatgtaaaacacatccgtcgaacggatggcaccgaaggtattactgatattcagaagcccggtcagaatacaggtgataatcacgccccagcggaattcaaacccgtcagtgctgccgagcggcagaaattcccatgatgcggatgccacatcccgtcccggcggggaaaacagcagtacgtaagctccccagcccagcaacacaccaatcagcagcgcatatttggccacggataccggggcatacacaatcacgcccagcaccaggatcaacgttgccagcgccaggaaaaagaccgggtaattcacggtggcatccggcggcataataccgaacggcagtcccagcatccctttcagaaaaatggagaccagctgcgcacctatcataaacataaacaccgccatcaccgccgggttaaaaatcctggcaatacgggctcctgcgccggtaaagccaatcaccagcgtgataagtcccgcacaggcaatcccgatagcaaggtttgcgccggtcacacccgcagaagtcccgaaagaggcttccgccacagcgatccccagaatcgtggcccaccacaggccggtcggcccttccataatcgcacgctggtggccggtaaacacctgcaccagactgccgagcgcggtggcgataaaactgtattgtgtgatagtcagtgtggcggcgtcagaaagatgaaacgcagattgcagtgtcggcgggatcagtaccgtattgcagaaaataaagaaataccactgaaagccggacagccagtggcttttttgcatttttatcatggggtaacgccttttggatgcagtgtcagatttatttttaatatagtgataatgatcatactatcaaagagagattattttgtgagtttttcacacagagaggtcatgatgaaaccatccgttcttgtttaccgcgatattcctgacgatatcctcacccgcctgtccgctgaatgcgatgtgcaccgcgtggcggaaattgatccggacattgacccgtcagtaaaaccgctgctggccggggcggatgctatcctcggctccggcgggaaaattgatgcccgtttcctggcgatggccccgaaactgcgggtggcttccaccatcaccgtcggttatgacaattttgatgtctctgccctcagtgcacggaatgtggtgctgatgcataccccggatgtcctgaccgaaaccgttgccgatgccacgatggcactggtgctggcgactgcacggaaaatgatcatcagctcagagcgggtgaaacgcggcgagtggacagaaagtatcacgccggactggtacggctgtgacgtccaccataaaacgatggggattgccggcatgggccgcatcggtgatgcactggcgcgccgggcgcactgcggattcggcatgaaagtgctctacaatgcccgctcccgccatgaaaaaaccgaaaaggcgtatcaggcggaataccgttcactgaatgccctgttggcagagtcagattttgtctgtatcaccctgccgctgacggcggaaacccgccatttattcggccgcgaacagtttgaaaaaatgaaacgcagtgccattctggtcaatatcgggcgcggtgccgtgatcgacgaagctgcactggcacaggcgctgaaagataaaacgatcctcgccgccgggctggatgtttttgaacaggagccgctgccgccggattcaccgctgctgtcgctggataatgtggtgctgatgccgcatatcggctccgcaacccatgaaacccgctatgcgatggccgcctgcgccgcggataatgtgctgcgtgccctgaaaggggatgtcagtcagaattgcgtcaatccgcaggttcagcaacagtaattatcccgtctgtacacagcaggttatctctgacggataatctgctgtctctgctatttcctcccctcccggataaatattaatttccataattatcagataaatacgatagcatttagtttgatctgtagcacactattccggcatacggatattcaggaaaaatacaggcaaagtattaaaggtcagcacatgaaaaaaatcagactatcgcttctttgtattcctgttttactttttggcttttttctgttttttcatgaaacaggacgcattatttatcatgaatccgacacttaccgctattatatgtacacagacagcgggatacggaatgcgccgcggatctcagagaattatcagtttgaatatatcccgacagaaggatcggtttctgaaatgagcagtgttgtttttcatgatgcacgggattgtgcaccactgaaaaattacctgaataatgccggttattatctttaccggacacaggatcagggacaggatgaaatctggttatcagcgcgggataaaaaagcgctctattctctgcaccgggataaacagggccggtttgtccgcctttcccgcagttctttataaaaacacagacggtatacagagccgtctgtattttccgtcagaaggtaatggaacgaccaatactgaccgggtcacaccagcgggctttatactctccggacatcatgccgtaagaataggtcaccggtgcgggcagttccgctgtcaggcagagattgcgccacatcagcatcgtaccgatggaatatttgcgtaaattcatatcgtagccgatgttcagaaaatcaataaatgttccccgctttgacggtgtggaaagcaataactgaatacccactgctttaccgtcaaaaaacgcaatttccccgaaaaagttattatagcaatgatgaaaaagtgcgcggataaccggatcgttctccacctcatgcccccgccggtctgcatataaccggaagtaggtttcaaataaaaaatccggcccggctgtgctgacattttcaaatgtcccgccatcagccataaatttacggatctcttttttccgggtggctctggttttggaagaaaaagcagaaagatcttttgaaacggccacatgacgccgggaaaacagcgaaaatgagctgttataaaactgacggcattccgtactcagggatttggttttaaacggcagaaaacatttaatatttttattaaaaggcagcaggatggagtagcgggggaaatacatccacttcaggcggtttgcggggttattattgtcgtttgccagccagccgttatctgtgcagacggcaccttcaataacgcctttttttgtataggcataaaaatccggttcaacgccctgctccatggcaaacttaatatagtgcggtgaggtttccgcgttataaccgaacttttcacagcaggcttcatagtcactgaagctgcatttttcccatccccggaatttcatcatacccgcagtgttctgaccattaatgtaatgatgtccgctattctaattaaaccgggtacaggtgcaactaataacagaatcaccgtggcaggttcatccccgccaaggtgattcagtcagaagataataatcaggttgtcagcccggcccggacggactgggcgggatcaatatgtgtcatcacactcagcacctgcgggtcacggcggatattcatttccgctgcaatagcgatatcatgcccttctttgaccgtcagattttcatcaatttcaatatggacatccaccagcagataatcgccggacttacgggttttcagatcatgaaccccttccacccccggggtatccatcacagactgcgtgattttggcgatggtttcttcatccgcaccgcgatccattaaatcctggagagattgcagggtaaatttcacccccatgcgcagaataaacagcccgaccaccagcgctgcgatcgggtccagaattttataccccatcagactgccggtaataccgatggccaccaccagcgatgatgccgcatctgaacgggcatgccaggcattggcttccagcatattggatttcactttacgcgccacatgcagcatatagcggaacaggccctctttcgccagcagtgccagcagcgcgacatacagcgccagcgagtgcacttcgggaatggtttccggcgacataatccgtgaaccggctgtccacagcataccgccgctgacaaccagcagcagcacgcccagaaccagcgatgccacattctcatagcggaaatggccgtaggggtgttcctcatccggcgctttacggctgccgcggttggcaatcagcaccacaaaatcagcaataaggtcagacagagtatgaaccccgtcagcaatcagcccctgtgagtgcgagaaaatacccgccactatctgccatgcagacaacagggtattcacccagacactgacccaggtactttttttcgcggccgcgaattttatctcacggctgatatccgcgctgttttctgcggtttcatccgcctgtgcaggtatattggacataatttaattccacattacttttgtggttaatacaaagcaaatacatgctgtggatcgtgatcattatagttcagcaaacggattaatgccgttctttctgaacaggaaataaagaattacaattaataaggttaaatcagaatattaattcagcgtccgcagtatgccacaatatttttttcacgtctccaattttatgattttatttgatttttataactgagaatcattattcttatcgcttttaaaacggcttctttcattccccgtctctgatgacgttatcattattctctttaattcattccttcttttttattattgttaataataaaaataaacgatagttattttcatttcacaaattaaataagctgccgtcatgatcacagcacacgctgtcattttttgtcatactgttactgatttcagttaacaggaggctgtatgtacaacacgattctggttccgattgatattcttgaagatgacctgacagacaaaatgctgccccatgtggaagcactggcgaaaattgataatccgaagatccatttctttaccgttatccctaacgtggaaatgttcttcggggtggaatacgcctcaatgccggtcagtatgcgggaatccggagagcgcattgaactggcgcttgccgcactgaaagaaattattaaaggaattgccgtgccggaaagtcagtacaccctgcacgcggctatcggatcagccaaaaacgaaattctctcttatgccaaagatattaacgccgacctgatcctgatgggctctcaccgcccgggtgcggcaacattcctgctcggctctaccgcagcaacgattgtccgtcacgccaaaacctcggtgatggttatccgctgatcccgtcagtctgtttattctgccccgcgtcacagcggggcatgttatttcagctgcgtttaagcttatcggtatttgccagatataacgccacggtcagcgccagtattgacagggtatgcaggaatgtcgcattggcatctgaatgatcgacaataattaagcgcaccatcgccgtaatgccgatatagataaaatagcgcagcggaaaatggtagcccgacgaaaaatatttcacaattaaggcaataaattcaaaatagaggaaataggtcacgatactgtctaatagcagataggttgttttctcctgcgcggaaaacagcagattaatcagcgtcagtgtttcctttcccataaatacaatcagcagcacacctaaaatcagcagtgcaatattcagaacccattgcagcacagttgctatctggcgggatggctgaaattccataatcaatagcctcagtgatagacgacaattacgcccgtaaacagtatgggtttaagtgtacgatgaaatgatgacagaaccgaataaaaaacaaaaaacacggcggatgccgtgttttttgtgtcagaaattaacagattactttgccggtgcatccagcaactggttatccgtgctccagatacggtattttacttccacatctttcggggcgtacaccacaaccggcaggcggctgttgtaacggacgaatgcttcgtcacccagattagcgctgacaaacgcttcgcgtttttcattattgaggcagcccatcatggtggacatcggtccggttaagtcgccggtctcataatagtcatagccgaaaccatcaacggttttctgtgtcagcgtaccgccgaaccactggtggttacagtccaccatctgttttttaccgatcaccagctcaattttgtactgcccttcatcggctttcggctctacggcaatcacatggcgaacctgatctgacgcagcctgcgggaaatgtttcagctctttcataccatctgtctgcacaatcttcagcggctccatatccgtggtttttgcttcttcagcataagcgcctgcggcagcgaacatggccataacaggaaggatcaattttttcatcaaataattaccttgttttataagtacatttgattatgaaatcgtctcataatcttcatgctgactattaagaacattataataatctttagttcactgccagagtaaaacacagaatattcttacaaaatggcagataatctcagataaatcaccgctgccagtgtgttaaaccaataactctgccggatagcatagacaccatcaataaatcacgatgcatttatgccattctgatcacggatataacgatacgccccatgcattccggcgtacgtttgttatactgaaaaagctgtattccccgtcaaacaggaggttctatgccacttgatcagcaagcccttatagcacagcttaaagattcaaatcctcgttttgccgcactgtatctgaaacatcatcagttaaataatgaaattgccgagcttgaaggcccgaacggcgcaggctataacgacaatgtcgtccggctgaaaaaagaaaaactgcacgtaaaagatgagatgcagcgcattttaacggagtgtcagtaagtttctcccctgtcagataacgccctttcgcgggcgttatcttatgtctccttccctttcgcaccataatctgacctgacgcaatctattgcacatcaaaagatgcataataattgcatctttactatccgaccggagttattatgtctgagaaagtctctgtccatggccacgaggtcatgaatatgattattgaaagcgggaagaattacaccacagaatcacttatcgcggatattcacgccacgttcggcgaagatacccgtttccatacctgctcggcagagaatatggatgcaaaagcgctggtcagttttctggcggcacgcgggaagtttatcggtactgaagagggattcagcacatcggctgagaaaatctgtaatcactgaacagcgaaaaaagaccgctatctcccctgaaggcacaaaaaccgggagatagcgtttcctgtaacaggaagaaaatcatgattgcgcgttgtcatcatccatccagctgtcatcttcccagatggtctgaatagtatccatcagcgactgtttatcgtcgggggatttcacgccggaaatattaatcgtggtctggctgctttgcgcaatacggaactgcatatccggatataacggcaggatccggcgttttaactggacttcaagggactgaataagatgcgcaggcactgcatttcgtttatctaacagaatttcaatacgcatgatgttgctctccgtaaactgtatacatatacagtattttatttttaaataaaaagaaagcaaattttaagcacagtatttaaatttatgggctttactgcataaaagaggagtttccgatggccggcaaacgtattttacgggaaataaaaaccgttacccgtatggtggaactgtatgaacagcgccatccggcaccggcagatgctccggaacattaccgcgatctgctggcgtatgcagtgaaacggctggaaaaatgccgttacggtgaagacaaaccggcctgcaagcagtgcccggtgcactgttatcagccaaaaccgcgggaagagatgaaagtgattatgcgctgggccgggccgcgtatgctgtggcatcatccgatcctggctgtccgtcaccttatcgatgacaaaaagccggtgccgcctctgccgcagcgccgccgcgcgccccgcaataatcaggactgacgcgcgcggtattccgcctgtgtgatcttatacagcacatgcgtctgtaacggatgcccctgttccagtgacggatgcagaaactcccgctgatactgcattcccgttttcaccatcacccgttcagaaggcagatttaccttcgcggtaaacgcgacaatctccggcatattcagcgtcataaaggcatggtgcagcaccgcgtttgccgcttcggttgcataacctttaccgtgaaagcgtttcgccagacgccagccgatttcagtacacggactgaaatcaaacggtgcggacgggatattaagaccaacaaacccggtaaattccccgctgcttttttcttccgccacccacagcccgaatgctttctgccgttcaaaacgacggataatttcatccgccatcgcatcactttctgccgcactcaggcaggccggaaaaaagcgcataacgtccggatccgcattcagtgcacggaacggtgcataatcatccggtgtccagggacgcaggtgcagacgcggggtatcaagagtaagcatataatcctccggttcattcagtcatgaaatataccggaggagtataacggatttacgtgagggcggcgcggttacacgcgcttaaagacagacgggactttctgcggctctttgttttttccgttaccgttctgtgacgacgatttcggcgcggattcctgtgatttctccgccgctgcgtctgctttttcagactgtttcagctcagtcaccgctgccggtttattattttccggacgggactgaggagcctgtgctgcggcagccgctttaccggcaggggcatacggctctgactggccgataaaggtaccgcctttacggatagagaaattagaggcgcggcagacgccgttaagctcaccgtgctcaagaatttccagctgttcgacggtacaggtgccggtcagcacgccgtcaatcagcagggtttcggcaaaaatatccccttccaccacaccggactgcataatgctgaccgagccggaacgggctttgatttgtcccttgattttaccccagatttgcagattaccgctgatctcaacatcaccggtcaggcgggtttctttgctgatcaccgtcggctggcgggattcaagagatgccagcgggcgctgtttctcttcaccgcgtgctgacagcagctgggtaatttcattagcctgggcactgagttcagccgcttttcgttcttcttcttctctttcttctctggttttttgcaacggtgccgcaaccggctccgtttcaggggtatctgcttgttttttcttaccgaacatgacgtttttccttttcctttccgggagaatcgtaatagcacagataacggcggcgatacctgttaaataaacaggccacgatgcgtgcccggctatcactgcatacagtaacaatccccataaaaaccaaagggatgtcagcataatattaagcatggcagacctttgtgatggtatttttacgttacggaagatacttttgcatattgtacgcagccgccgcgccggtaaagggcggattaagaccagtatcagtatgtaatcagggaaatagagaaagcggtgactatagccggatacactccgtgtaccctgtgacagcatcccttcattacaatccgtcaccgccctctcaggggtctaccttaactgaagagggcagaataaaaatatcacaattacaacaggattttatccctctcaggcccctttagtcccccggatttttccgccttctgccgctaagcggtattgtgccagcgcctctgcctcttcaggttcatgcgtgaccagaatcgtggtgatcccttcttctttcagcagattaatctgcggccataactgtctgcgggtcgcccagtccagcccggagaacggttcgtccagcaacaacagtgccggcggtgagatcagtgcgcgggccagtgccacccgctgctgttccccgccggaaatctgatgcggaaaacgcgccgccagatgtgccacctgcattttatccagcagtgccagcgcctgtgatttgtcgcgctttaacccggcggcataccgtgccagccgtaaattgcccagaaccgtcagccacggaaacagccacagccgctgattaagataacggcagggacgtttccagaccggcagcggatccagagggacatccccgagccggatggagccctgataaggcagataaccggcaatgcagttcagtaatgtggtttttccgctgccggaaggaccgcagatcgcggtacattgtccgcgcggcagtgtcagcgagagatcctgcaggatccccgctctcagatgttcaacgtgcagcatgtgaaggttgccttttcagccggtgcaatgcgaccagcagaacaatcgccagtgccatcaggatcagcgcgcagccgagcgcgagtgaaaaatcaccgctggcaatattaagataaattgccattggcagggtttcggttttaaagcgggtggcaccggccagcatcagagtggcgccaaactcccccagcgcccgtgagtaggcgaggatcccgccgctcagcaatccctgcagacacaacggaatttccgccagcagcagggtttttccgggcgtcagaccgagattcattgccgtgcggacatatgccggatccaccgaggcaaacgccccctgcgccgaacggtacagcaccgctgacgcgacgtaagtctgggcgataatcacccccagcggggaaaacagccagcgccccaactgcgggaaaattccggccagcgggccctgactgcccagcagcagtaacagcccgataccaatcaccagcggcggcgtgaccagcgggatatcaaacagtgcatccgccacccgcttgccggggaaatccccccccaccatcacccaggctgccggtacggcgatcagaaatgccagcaccagcgatgtcagtgaggtcgccagtgacatcagcaccgcaaaatgaaattcagggtcagtaatcagctgagtcagcaacgccggcgttacctgaaacagtaacgccagcagagacccggtaatcagacacaacaacagtaacaggggcaccagcgcccatttcatcaccggatacatcgataataccggaatcagtgtgcatcagccggtctgaccggcagaaaaccatagtcggtgaaggctttaatcccttccggagaggaaaaatattccgccagttgttttgcttctgccggggatgcactggtgctgagtaccgccagcgtagccacctcttccgggctgccttccggtgacggcagaataatcagtttatcgcggtttttcatggcatcggcgcggccgataaccgcagcatccacctcaccgttaagcagatacatcgacaggtgtttaatcgttgccgcccggacaatgactttttcccgcagtgcatcaccgtaaccgctggcatccagtaaaacttcaccgctgcggcccagcgcaatggctttcgggtcccccatgccgatacgcagattacttgcggcaagatcagcaatgctgttaattccgtctgctttatctttgcgtaccgcaattaccggaatatgccggacgatcggataactgtctgtcacctgtttttctttctgcagcttttccacgtaatccgccgatcccgggaaaaacagatcaccctgctttgtcagttcaaaccgggtcaggatctgcccggaaccgccatattccaccgttaccgtattaccggtctctttttcaaactggctgatcaccttttcgatcggcgggggccgaccggcgccggcatacatatgtaactcagcggccatcacggccggaacggaacaacagaacagtaatgcagagagcatcagacgacgggacgacatagtaacctcactcgttatatatttttttatataatgattaaaaacggtgagtggtgcaagggacagtcatcacgaaacggcgtatcatctgtcatgtccggtggcgttacccgccggaaataattcacgatataaataatatctaaattaatattcatcagaaaaattttaatccgctatatgcagcataataaaaacataaaattaaaagtgataacatcaatcatcacagcagaaacaatcattacatttttgcagagtaatacgctgcccttcaccggtaacaatagtattaattaatatccgcttaatatatccatcaataaaacagattcaatgataatgaactgtatatacatcccactcgcaaaaacataacaacaacaaaatagcatcattttagaaacataattcataatgacattacttgttattcagtgaagttattcatcatgtaaataaaatagcacccaaaccaataaataaagccgttaatgtcataaaaactaattatcaagtagaaaagcccgacattagttatataattatttataccggatggtttggcactgtccctgttatttaatttccgaaaattaagccatattgttcactctgagatgcccatgaactcatgtactttgacatctgacaataatacagagataaaatctgttattgttgagcctgatatttttaatattaccgaacaacaggaaaaaggcctttaccttctgatgtccggaaaaatgaaatggcaggattgcataaactcatacacacttaatgacaatgaagttattttctctaatcagggaagctatgcataccagcatatttccggtgaaatcaatttattatggattccgctgaacaaccattttctgcggggttttcttcaccgtttttctgatactctcagccaccttcaccgtgttgctgatccgacatccggactcatttattttccgcagtccgctatgctgaaaaacagtatcagcgggttttatgatgcgtattgcaataatgcgccatcaccgctgataaagctgaagctggaggaattattattaattatcgccctgagtgaagaaggcacacgtctgatgtcggtattgcgtcagctgagtaaccgccaggcagaacgtttgcagagcttcatggaaaagcactatctgaaagactggaagttaaatgaattttccagagaatttggtatgggcctgacaacattcaaagagctgttcggctcggtatacggtacatctccgcgggcatggataagcgaacggcggttattgttttctcatcagcttctgcttaatacccagatgagtatcgttgatgtctcaatggaagcagggttctcaagtcagtcgtattttacccagagctaccgtaagcgtttcggatttacgcccagcaaagcccggggtaatcatataaactgacgaattgtgataaaaacagaaaacaaaaataataccggaaaaaaacgggtctgttaagctgcgttcctttgctttacttttattcaccagagggattcatgcttaataaaacaacttatcatctttatctgtcagatgatcgaatatataactcagaagacgcctgtaaagagaatgatttattatctgaatatcttacacgtcagcagacagataatttaaagacaactgactggttccgccgcagaaagaaatggaatattccttttcagtaccgtgacctgaccatgatcagacagacaatacaggcttaccctgataactgggatgcccgtttatctgacacaattatattatccgcatcccgttactggattgacgggttattaaatgaaacgtatgaatactggataaaagatacacaccgtgagctgtgggatctggaagaagaatataatcagagcagaataataaatcgtcagctggctgccctgtatacactgtacagtgcatattatccgcagacggagctgtcagatatcaaaaacagtctcgcggggtccgcacaggatctttcccggacagagcataatattcacactctcaggagggaaattccgttcacgctgcgtcattttgttaatctgttccgtgatgttatttatcatcataagtccttgcaggacaaccgcattccggactatttccgtactgccgtacaactgattttgcagctgaaaaacaacaatgatgacgaccggctgtatcagtggctgaacagccgcaatatctgtctgacgacagataaaatacactggtgctgacagcaccggcaaatatagcggataaagggatagcaatatcccttttatctgacgcatatagcaataacagataaaaataaaatagtgactacgacgggaaataacacacgaacggcatttgcctgacaacctcaagaggattgatatttatgtaccgtcacactaaaacgactgctgtcacacctgtgtttaccgatgaacgccggttgttatggcagacactggaggcattccctgccgaaagccaggaataccgggatatctgtgtaagtttactggctccggtgatttgtgatctgaaaaaaacaaaacataccggacaaatcaccagagactcactcttacagatcctgtcccactatgatgaatacggcgaacagcaggaatttatcttatcccggctgtggcagtcactgccggagtcattatctgacagtgacctgaaatcactgattgcagccgaactcaatcagttgctctatgtgaataaccaactgactttctctcagtttaatctccgctgatgcgccgcattaatccggcaaaatcgcaaatgaccggacagggaatccgcccgcattgtccggctttgccacgatattaaaaatcaccgcgcctttggccgggactttatcaagattagtcagcagttctatctgatacgcatcctgatccaatacaaaatattccgccagcaatgcactgtttttgcggaaatcctgcgccgaatcggtatcaaaggtttcatgccccacggcgctgatcccgcgctcacgaaacagaaattccagtgcgtccattccccagcccggaatatggttgttgccttccgcatctttattatccatcagtgtctgtgacggccagcgtttgctccagtccgtacgcaatgccacaaaactgccgctttcaatacgtccgtgaacctgttcaaaagccagtacatcgtctgcggataacgcaaaatctgcatcctgctgtgccctggcggactgatcaatcaccaccagcggcagcaccagctctttcagttccagctcatgaacaaaacgccgcccctgcacaaaatggcacggcgcatcaatatgagtgccgtactgaccgggaaacgtaaactgctgggcaaaaaagccgtcgcggtaatcaaacagcgttttaaactccgccggttcaaacataaaaaagtgcggcgaatccgcattaaatgcatgtgtcaggtcaatccattttttggatttcaacagattcacggcttcagttaatgataatgacattctgccccctcaatgttataccggtagttgttgtgatttatgctctggttatcagtcagaatttacacggcttgccggggaagtcatttgcagatatttcatgttgttgtccgcaccggacaaggggaaaataatgttaaaagtaatcgctgaagattttatgcagccggatgccgttgagatcctgatgccgatgtatgaagaactggttgcccccccccgccgtgagccgttgtgcatcagttatgatctgtttgtcgatcagaaagacccgggacattttgtttttatcgaaacctggccggatcaggctgcgctggatgcccattgtgccagtgagcacttccgccgcctggtacccgccattaataaatatcagcgtgccgaaccgcgttttatcctgatggacagcgccgttaagtaataatcagggcgggtatccccgccctctctgttttcagtcgtgggtgattttttcttctttcgctgccgcctcacaccactcaatgatggcaggatgcgccaggatccggtcaacccacgcctgtgccgccgctgaaaacggcaactgataagtccgtgcccgcagggccaccggcacataaaaagcatccgccgcactgatattttcccctgccagccacgggccgccgaaccgggttaatccctcacaccagatcttatccagacgctgacactctttctgtaattccggtgtcatctctgcggccgagcggctttccgagcagttcagcgggcactcacggcgcagcgtggtaaacccggaatgcatttctgccgcggcagagcgtgcccaggcacgggcggttttttcctgcggccagacatgcggataatcctccgcaatatattcacagattgccagagaatcccagaccgtggtatccgctgtcaccaggcacggcaccagcccggacggggaaaagcggagaaatttctcataactgctgccacccggtacaaaggtggccagctgttcatcaaacggaatattcagggctttcagtaaaaaccagggtctcagcgaccaggaagaataatttttattggcgatccacaattgcagagacatataacccctctcagtgaaattaaaataaatgatataaacagcaggctgattaccttacccaatgtagccggtttttattccgctgccttaaaaaaggataaatcctgttcatattctttctgatagtgcccttccgtacccagcgcatcctgcaaaaaatgtaaaaatgcagagacttttttcggcagatattcacgatccggataaaccgcatagatatgatgcaatggcagcgggtattccggcagcagcgggatcagccgcccggcgcggatatccggtgccgcgataaactgcggcagctggcagatccccgttccctgtaaaacagcctgatgcagcgccagactgttgttggcacgcaatgtcccttgcggggtaaaacgcacgacttctccccggtacagaaatgtccatgactgaccggcctgaaaatagctgtaaaacaggcaattatgcgctttcagttcagttagattctgaggcgtgccgtatcgcgccagataggcgggagacgcacacaacacactgcggcagggagataacacgcgggcaatcagagaggaatcctgcaattcaccgatcctgacagccagatcaaacccttccccgaccagatccgtcagcttgtcatcaaacaccatttccgcctgtaatgacggccagcgctgtaaaaattcaggcattatgttggccagatgcagactgccgaataccgccggcgcactgattttcagtgtgccgtcaacctcacggctgtagtgtgacaatgcatcctgcccgtccagcacggcctgatgggcttttttcagataggtgtaataaagctgtccggcttcagtcagctgcagatggcgcgtggaacgggtgaccagccgtatgccggtttgtgtttccagcgccgacagttttttactgaccgccgatttggtcatatgcagatactctgccgcttttgtcaggctcccctgttcagtgatcgcaataaacaccggtaaaagcgaaaaatccatagcagctcctttattgtcaacttacgggaaactctgtgtttctttttatagcgtttattccgggcaccggcaatctctatactctctccgtccgcaataaagtgaaaataacgatgaaaaaagagatcctgttaccgttgatagccttactttccggggtattactcaccctgatgattatgagcaacagctatttatccacctttacttctccgctgcacgcctcctggctgacacacggtatcggtgcaattgttgccctgattatctggctgacagtgaaaaagcacctgccgccacgccacgccggtacaaaaatgccgctgtggtgctatctcggcgggatacccggtgcgtttaccgtactgctggcggcgatcaccgttaacagcccgctgtcactctcaggatcgattgtgctgatgcttgcggggcagatagtgaccgggctgattatcgaccattttggtctgatgggactgacacggcgtaaagcaacaggccgcgacgggctgacactgctgctgttattcagcggctgtattttgatcattgcaggaaaataatgatgttactgttttatattactatcgcgctgacaaatggtatttgtattattttcagccgcagtattaacggcagattatctcagagcagcaatgcgttttatgcctcgctggttaatcatattgccggttttatctttctgagtgtggttgtcctgttttacctgccgcagttccccgtcacactgaacagtattccgctgattgcattcacaggcggtattatcggtgcctgtttcgtggtgataaacagttatattctgccgctgctcggcgccacactgaccaccattctggctatctgcggccaggtattatccggttttattatcgatatcatacagcacggcatgccgtcacacctgctgatgcagataaccggtgtcatcttaatcctgctggctatcgctgtccgctaccggaagtaatttttcttatttcgttactcagcgaagtgttttccctgtgcttccgatatgattagccggactgcataaggagaatcccatgtttgctgtaatttttgaagtgactatgccggaagacaagcaatcccgctatctggatatcgctgccgggttacgcccgctgctcagtgacgcagaaggctttatctccattgaacgttttgccagcctgagcacaccgggtaaattattgtcgctctcattatggaaagacgaggcttctctgctgaaatggaaacaaaacctgcagcaccggcaggctcaggaagaaggtaaagcggatattttctctttttaccgcatccgtattgctgagatcacccgtgaatatgacttcgggcaggaataaccggcggagctgatatgccagaagaacacgcacctgagttagaaactgcgcttgccggtgtggctgcggcactggctgatccgtcccgtatccgcatgctctgcgccctgatggacggcagagcctggacagcaactgaactgagcattgccgcggatatcagtgcctccaccgccagcgctcatctggcaaaactggtcaccggaaagctgatcatctgtattccgcaggggcgtcaccgctattatcagctggccggattaaacgtggccgaaatcatcgaaaaaatgatgaatctcaccggtattccggtaacagccgccatccgcaaatcctccgccccgccgcatttacggcaggccagaacctgttatgaccatctggccggggaaacggcggtggctgtgtatgatgcgatgcaggaaaaaggctggataaccgctgacggtaccacgctgacaacggcaggagaatctgcgctgaccgaactcgggctgcctgccgctcacacggtaaaacgggttttctgctgcggctgtctggactggagtgaacgccggtttcatctcggtggctatctgggcgccgccctcttcactcactgtgagcaacagggctggctgacccgcacacccgggtaccgtgaagtgataattaccggaaaagggaaaaaacaattccggcaatggttagggattcagatcccgtaattatgaacttctgaccagtaataacgataatttacgggcgaacggcaaaacaaataagacggtcgggaatgcaatggcccaggatataccccatgatgtcagccacggggaaaccagcagccaggaaaatcccagcgctttgacggtactgataaacgaaacaataccactcatgaccagtgataagaaaaaaggcaccaggaagattaacgcacgctgaggcagcttcggaaaacctaaaatataatttttgtcctgaaaagacatagacgactccgtatagtgacgacacaacaacacataactgttgtaatgcacaaagttacatgcgttgattaacgtaaacgcttacgggtcagagaattgacctttgatggcgctattctatgaatctgaatgcatttgtcaaatgcaatttattctcaataagaaaaataattacgtttactcagtcatcatccgaaagattcaggaaactgaacatgctctctttataacgggtagtggccttcagcatttctgtaccggatatatcctgcaaacgcccgtcatgtgccattttgcggaggtcatcaacccggagatcatcactcagcagcgcgcgtacagtaatattgtccggaattaaatagatcggtccgcgcataagctgtgatgctcccagccggtcaaaataaaaatactgtccgcctttctgccagacctccccgtaatggtgagaggtaatatcgccgacttttacccagttatccgttgtattatcatcgagacgataaagtatcgtactgcgggaaataagccccggtgatttccggccgccccatgattctgccccccgcaaataccgggtttcattaccgcaggtgaaaatcagcggtgatatttcctgacaactatcctgtaatggcggattatcaccggcgcggcggattttttcttttttccggtcataaaagtaaacgccctgacgggataaaaacagtccctgattaacatgctgaccatagtaactgatcacacggtaaggcacatattccggcgggaacatgacattattcatggccacctgaccggtttgcggatcaaataaataagcttcctgaaataaattaccgaggtaaaaactatacagtgattctgtatctttcagcggtaataagtggtgctgataataaacatgttccccgtcgtgataaaatacccggctctcacgcactgatttatcatcctgccggactcccacaggacgcaatgtctccgggtttgcctccggcattaatttaccgtcaaagaaaacctgttctccgttactgacaagaccggaatccggtaaaatccggtaaggtgtggcagacggcggcagcggctgctgcggataataataagacagtggcttatcactcagtccccagccgtaacgccattcctgatacagcttttgcaggccggtcagttcattatttatccgcgtatacggggcacagaaaaccgtatttttgccatcggtaaaatagccattcccgatagtaaccgccgtctgaggattaaaatccgcaacgggaagattaccgcaccaggcgtgatatttatcggctgcaaattgtcgtccgttgtggttgttattgtcaggcaataaccggaaactgtccgggtccgcaccgggaattaaaaaatacccgtcagacggaacagcggcatacacccggccgtcatacaatgtgaaaacggagtgcccgaatggtttcccgttccggtcaatatcgtaatacggttctttatccatggccagaatgaccccggatataaacaggacggagaccagcataatgccggacataatgataagaacaaggcgtttgcgggctttcataggatgaaatagtatccgaaagcattgccgtctgctatcagagaaaaccatttttcagcccggaattatcatctttccggctgttataccagtatctgcttcataaaaattgtaataaacagatccagcggttcaccgttacgggtcagtttggcacgcatgactgccccttcccagcccgcccagaaaaaagccgccatctgcctgcagtcagtatttccggaaataaaattttgcgcctgtgcttccagaagacaattctccactttcttttgccagccggtaataatgtcattgagtaattcacaatacccggccggcagactgataacttcctgcccgagattgccgatcagacacccgcgctgccagtgatatttttccattccggatttggcaatcctgcaaaatgtcagtaatctttccggtggcggcaatgtggtatcagacagacatttatccagcagatgagaaaaacagcggtcataatgacgtatcactttcacaccgaaattttctttactgccaaagtaataataaaaagatcccttcggaataccggcttttgttaatattctgctgatatctgacgtcatatatcctgtttcggtaaacacctccgtaccgctgcggatcaatatttcttttacatcggtacctgcatcatggtttttcggcggtcgtccccgtttcggctttgtcattattgctgtcattacgttttatctctgttatgcggaatatacagattgctgttcgtatacattccggctgtttcgctgcaggaaaaaatcctcccgccgttactgcacgggaggaacccaccggagagtgttcgttatttcatcattacgtcctggttttgtttcatttcaaaccgcggggaaacaaaaccatacagtgtccagccgaggaaggtggcaagcgccccccacatcacagcatcttcaccggatgaatacagcgcatagaaactataaacagcaccgataaatgcaatcacattgcctgtccgtgctttcttaggatccacattggcgactttctgcagaataatcatggcagccatggaaaggatataagggataatattagtaacaaccgccaggttaaccagcacattgaactgtttattcagtgacggactgatggtcatcagcgacagtgcagactgaataataacaataaccagcataccttttaccggggcatccgctttggtaacagcagaaaagattttcgggaaataaccggaatcggatgatgatttaaatacctgcgcaatggtgaactgccagcctaataatgaaccgcagcaggacataatcatcagcgccataacaaccttacccacacccggcgtaaacatttgtgagaatgccaggccaaacggtgcagtagagtttgccagatccatattcggtacaataccggcaatgacgtttgttgatacgatataaataaccgctgcgcctaatgttccgcccaatactgctatcggcacatttttctcaggattatcaaccgcctcactgttagcacaggctgactccattcctaaaaatgcccataatgtcatcgcaatagaggaaccgaccgcctcaaaaagcggaaaattatgcgggttccaggaattaacatacagttcaggactgaaccaccaccagccgataaccgaaataccaacaaccggaataatgaccccccagacagtcacactgctgatccgtccggtgatccgtgcaccgccgaagtttgccaccgtacaaatccacaacacaacaattgtggcaatacagatacccagcggcgtcatcgccgcatccatcagttcagccccataaccgacggctgaaatcgcgatcgcaacgtttgcaatcagcagagaaacaccataggtataattcgccataaagttaccggatttaccgaatgcgtattccgcgtaacctcccatcccgccgctgcggcggctgtacataccgcacttggcaaatgcataagccagagccatagaaccgacggcggtcacaagccatgacagaatagaaaccgtccccacttccgccagttttgtcggcagcataatgatgccggatcccatcatattcactgcggttaatatagtgagctgtaatacgctcattttattctttgaagcactcatcatatttctccccggctgacggagcacgctcatccgcgctccgccatgcacgaattaacgaactcagtgtttaattacatagccgtatgcccgctgacggccatcttcatcacagcggatatacacaccctgtaattccggtgagaatcccgggaagaggttaatcccctcctcgagcgccagaaaatattgctgcacggagccgccccagatttcccccggaaccacacacagaacccccggcggataaggcagagcaccttcagccgcaatacggccttcaatctgatccaccgcaaccaattccgcgttgccgcgtacaaacgcaatattcgctgcctgcggtaacatgctgacctgcgggaagtgtgatttgcggaacatctctttctggagttgtttcacattaaacttcacatacatatcatgcatttcctgacataactgacggatggtatacccctgataacgggcttcatgcgcatgatatacagacggcagtacctctttcagcggagcatcctgttccagtaattgctcaaaacgggcaatctgagccaccagatgctgcatttttgccatgctttcagcaggtgtcagcaggaacagaatggagttgagatcgcatttttcaggaatgatattattttcacgcagatagttagccagaatcgttgccggcacaccgaacgcttcataattaccggttttggcatcaatacccggcgttgtcagcagtaatttgcacgggtcaacaaaatactgattttcttcatatccctcaaaggcatgccagcgctcacccggcacaaaattgaagaaccggagatcattggcaatcacatcagtctcaaaatcgccccatgaacggccatcaatagtttccggaatgaacgggcggatatgtttacaggatttcagcagcaacttacgggtttcaatcccggttttcacgcaatccatccataaacgcttacctgatttcccttcatgcattttggcgttcacatccagcgcggcaaacagcggatagaacgggctggtggaggcatgcatcataaaggcattattcagacgcttatgattcacataacggctctggcctttaatatgactgtcttttttatggatctgagatgtctgagagaaaccggcctgttgtttatgaacagattgtgtgaccagaattccgggatcattttcattcagctccagcaaaagcggagaacaatccttcatcatcggaataaactgttcataaccaacccaggcagaatcaaataaaatgtagtcacataaatgaccgattttatcgacaacctggcgtgcgttataaattgttccgtcatacgtacccagttgaataaccgccagacggaacggacgtttttcgccggttcgttcaggtgcgacttctttaattaagctgcgaagataatcctcttcaaaacaatgagcatcaatcccgccgataaatccgaacgggttgcgcgcagcttccagataaaccggtattgcccccgcctgtattaatgcgccgtgatgatttgatttgtggttgttacgatcgaataataccaggtcacccggcgccaataaggcattaagcaccactttatttgaagacgacgtaccattaaggacgaaataggttttatccgcgttaaaaactttcgccgcatgctgttgtgccgcgcacggagccccttcatgaatcagcagatcccccatggagacatccgcattacataaatcagaacggaataaattttcgccgaaatattcagcaaactggttacccagcgggtgacggcggaaaaactccccgccctgatgtccgggacaatcaaaagctgaattgccctgctcaacatattttttcatactgccgaaaaatggcggtaacagactttcttcatatttcagcgccgctgtttccagttgcttactgtataattcaccgttctttttatttaaatcaatcacgccggttaaccgtgtaatgacatctgccggaatgacttcgtgatcactgattacagcaaaaaccggctgttcaaaactgtgctgctcaataaaatccagctttccgtcgcggatatcatcaagtgaaataacgatgacagcaacatccgtaaaatctgtattcaggatatccacacattcccggtgtgttgaaatatagtcagacatatcatagctgacagcgattttataacttttcattttcataccttttatttttggcaaaaaattcccgctgaaatattcagaaaaaatatttcagttatttattttcataaatgcgagcttgttccctcaatatactattgagttaaaaaatcacatttctctttatgccattacgtatgccaaaacaatattcaggactgacagttttcactatctcagcaagggctttttttaccgcaaccgggaatgacgaaagctgtttacctgcatattgatatgcatgaaaaccagagtatgaattatcaatcagaattcagcatatccacacataaatgcgggatataatgagaaagaggtcgacgatccatacgatggcaatatgcagacaacgtcatggatgtcagtagagggactacctttgtgcattaaaacgattaaaatcaaaacacgaacgatgtgagaacatcataaggtgtgtaacacgtcttatatgcggccaaaatcggttattgttttccatttttgcacctgtttaaaattaagactatctgacgaacaattattaatataaccaagtataaatactataccgtgatatacatcaaaataataatcctaaaaatatatttaaccaatatcagttagtataaaaatacattttgttaatactgtgttgtgtatattattggcgaaaattaaaaaaacaaatacatatttaatatagttactacgtctatattatagataataactaatcctctgataatatagtgatctggtctataatcattatttataagataataaaatataatcacgacatatatatttaatcaaatcgcactaatagtttaattttaaattaaggtgcaataacagtaaattataaaaaatactattttatgaccgggaaactcgtaaaattaataaagtattatttttgaataattattcatttcagtcacaatatttctccgggccggtaaatatataaaacagtacgaagccggagcgcaatgacaagcgccattatgctgacacagacacatgtgtggctgaatcagagtttcagacatacgggatgagatgcaccggagagattcagttgccggaatatttgataacacaggaagttaacgaagaaaactggagcgggcgaagggaatcgaaccctcgtatagagcttgggaagctctcgttctgccattgaactacgcccgcgtcgggatgtgtgagattatacgccggtcatcttgtttatcaagaggatagtgaaaaaaaagccccacaaatttgtgaggctccgtgttcatttactgcaacaattatttgcccggacgcatcgcagggaacaggataacgtcacggatggtgtggctgtcagtaaacagcataaccatacggtcgattccgatacccagacccgctgtcggcggcagaccgtgctccagcgcgacaacatagtcttcgtcatagaacatcgcttcgtcgtcaccggcatctttctggcgaacctgctcggcaaaacgttctgcctgatcttccgcatcgttcagctcggagaaaccgttaccgatttcgcggccgccgataaagaattcaaagcggtcagtaataaacggattgtcgtcattacggcgtgccagcggagagacttctgccggatattcaatgatgaatgtcggctggatcagatggctttctgccacttcctcgaagatttcacactgtacgcggcccagaccccatgatttttcaattttgatattcagggatttcgcgatagcaaccgctttatccatatcatccagatctgccatattggtttccggacgatatttgcagattgcttctttcatggtgagtttggcaaatggtttgccaaagtcgaattcctggtcaccgtatttcacaaccgggttgcccagcacatcctgtgcgatggtgcggaacagctcttcggtcagtgcaatcaggtctttataatcggcatacgccatataaagttccatcatggtgaattccgggttgtgacgcggggaaaccccttcgttacggaagttacggttgatttcaaacacgcgctcaaaaccaccgaccaccagacgcttcagatacagctccggcgcaatacgcagatacatatcgatatccagcgcattatgatgggtaacaaacggacgcgcacttgccccgcccggaatgacctgcatcatcggggtttccacttccataaaccctttgttcaccatgaatttacggatttcagccagaatgcgtgaacgcaccgcaaaggtatgacgggattcatcgttggcaatcagatccagataacgctggcggtagcgggtttcctggtcactcagaccgtggaatttatccggtaacggacgcagtgctttggtcagcaggcggacttcggtacagtgaacagtcagctcaccggttttagttttaaataacttaccgcgcgccgcgaggatatcgcccagatcccattttttaaaggattcgttgtacacaccttcagccagatcatcacgggaaacgtaaatctgaatacggcccgcagtgtcctgtaaggtggcgaaagaggctttacccatgatacggcgggtcatcatacggccggcaatcgcaacttcgatattcagtgcttccagctcttctgcgcttttctcaccatatttttcatgcagatcaccggataccgcgtcacggcggaaatcattcgggaatgcaacggcttctttctcacgcagcagtgccagtttttcacggcgtgtttttaattcgttatttaaatcaggtgcctgctcagcactgtgttggtcttgtgacatttttaatccttataaacccgcttttaagctggcctcaataaatttatccagatcaccgtctaatacagcctgcgtattgcgggtttccacaccggtacggagatctttaatacgggaatcatcaagcacataagaacggatctgactgccccagccgatgtcggatttgttatcttccatttcttgtttatcggcgtttttcttctgcatttcatattcataaagttttgctttcatctgacggaaagcctgatctttatttttatgctgcgagcggtcattctgacattgtgtgacgataccggtcggaatatgggtcagacgcaccgcagattccgttttgtttacgtgctgaccaccggcaccggaggcgcggtaaacgtcaatacggatatccgccggattgatttcaatatcaatgtcatcgtccacttccggatagataaacgcggaactgaacgaggtatggcggcggccgccggagtcaaacgggctcttgcgcaccaggcggtgaacgccggtttctgtgcgcagccagccgtaggcatattcgcccatgatcttaaccgttgccgatttcagaccggccacgtcgccgtcagattcttcaataatttcggttttaaagccgcggctttctgcccagcgcagatacatacgcagcagcatgcttgcccagtcctgagcttctgtaccaccggaaccggcctggagatcaaggtagcagtcagcgctgtcatattcaccggagaacatccggcggaattccagctgaccgagtttgtcttccagtcccttcagctcttcaaccgcttcgttaaaggtttcttcgtcatccgcttcgacggcgagttccagcagaccgctgacatcctcaagcccctggtcaaggtcatcaatggtttccacgatggcttccagagaggcgcgttccttaccgagtgcctgggcacgttcaggttcgttccagacgtcaggctgttccagctcggcattaacttcttctaagcgctctttcttggcatcgtagtcaaagatacccccgaagcaccgaagtacgctcagtcaaatcctggatctgattttttaccgggttaatttcaaacatgtctttttatcttttgttgattgtcaggtaataatgtgagaactgcacattgtagcgaaaatccgctcatcatgacagcactgcaaacccctttcggactaaaattaatccggccagatatgttctatcagtaactgcacactgcgctgtccgcggaactcattcacatccagtttatacgcgagacgaacccgctgcacactgttgtccggccagtaattcacatctgcgttaaaggcgattccgtcgagcagcggaccgccgccttccggctcaatcatcactttcaggtgtttttcgccgacgatgcgctgttgcagcagccggaatgtgccgtcaaacaacggttccgggaacccctgtccccatggtccgccttcgcgcagcaaaccggcggtttccagtgtcatatcctgcggtgacagcacgccgtcgctccagataaccccgtgcagcaagccggggtcaatcatatcatccaccagcgcggcaaatttatgctgaaaatcagggaaatatgattccggcagcgaaagcccggccgccatggcatgcccgccgaatgcggccatcattcccgggttgagggtatcgagccgctcgagcacatcccgcagatgcaggccgctcaccgaacgcccggagcctttcagcagaccatcaccacaaggggcaaaggcaatcaccggacggtgataacgctctttgatacgcgaagcgagaataccaaccacgccctgatgccattcagggtgatacagggcaatgcccgacggcatttccgtggtgctgtgctcaattttgctgaacagtgtcagggcttcctgctgcattccctgctcgatttcgcgccgggtctggttcaggccgtccagttcatgtgccagcatgcgtgctttcgccatatcatccgtcagcagcagttcaacaccgactgacatatcatccagtctgcccgccgcattcagacgcggcccgagggcaaaacccagatcactcgccaccagtgcgggagcctgccgtttggagatctccagcagcgcggtgatcccggcacaacagcgtccggcacggatgcggttcagcccctgatgcaccaggatgcggttgttctgatcaagcggccccccgtccgccactgtacccagtgcgaccagatcgagcaattcagccaggttcggctcggcaatattctgttgtgcgaaccagtcatccgcccgcagtgatgcccgcagcgcggacatcagataaaaggttacgccgacaccggcgagggatttggagagaaatccgcagtctgccaggttcgggttaataatcgcttccgccggcggcagaatctctcccggcagatggtggtcagtcacaatcacgcggatcccggcagcatgagcagcggccacgccgtcatgagaggaaataccgttatccactgtcataatcagctccgcccctttgcggcgggcctgctctgtcacctgtgcgctgagcccgtagccgtcctcaaaacggttggggacaagaaaatccacctgccggaatcccatccggcgcagtgcgcggacagacagtgcagtgctggttgcgccatcagcatcaaaatcgccgacaatcacaatccgctgattctggtgcagtgcttctttcagcagtacaacggcctggtcaatgccattaagctgaccgtaattaagcagcccgcgtgcaccgcgctccagttgctccgcagaggtaattcctctggcagcatacagacggcataacagttcggggcgatcgggagaaagcagtgctgtgtaatccgccgcatcacggcggcggagttctgtttttatcataacaacctgattatactattaattatttatttactaattcagcaattttatccgctgacaggtaaccggcaatcagcgttccgtcctcaaggacaatcgccggagtgccggtgatgccgaatttcaggccgagattatagtgtttactgatatcaatgttacaactgtctatctgcgggataggctcattacggaacgcgttatccagtgctttggttttgaacccgttgcaccagacagactgcatttcccggccgaccgcagactccggccctttgcgcggaaacgccagataacggaccgtaatacctttattattcagcgccttattttcattatgtaatttcaggcagtacggacaggtgatatccgtaaagaccgtaataacgtggctgccgcgctgagatttataaatgatcatctcattttccagactgttcagctcatccagcagcacattattggtgatatttttcggggttttgccgctcatatcaaacatcggcccctgcagcagataacggccgtcatcgctgatataaaaaacaccctgcggggtggctaccgccgagacacccggcaccggtgacgggcggatcatggtggcggtcatatccattttgcccagtgccgctttgatttcgctttccccggcgactgcgccgtggctgaacaccagcagaagcgccagtgcggatgatacaattttcagcatactgtttccttatcagccgcgcggatggtgctgctggtgcagcgtgcgtaaccgctccgtcgcgacatgggtataaatttgtgtggtggataaatcactgtgccccagcagcatctgcaccacccgcagatccgccccgtgattgagcagatgcgtggcaaaggcatggcgcagcacatggggcgagagtttttcagtcgcaatcccggctacgaccgcatagtgtttgatgcggtgccagaatgtctgccgcgtcatctgccgcccgagtttgctcgggaacagcacgtccgcagcctgtccgttcagcagtgacggtctggcctgtgccagataaacccccagccagtacaccgcttcttcccccatcggcaccagacgctctttattacctttaccgatcacgcggatcacgccctggcgcagactgacatccggcagcgacagtgacaccagctctgtcacgcgcagtccgcaggcataaagcacttccagcatggctttatcgcgcagttcaagcggatcggtaacatccggagccgcaagcaggtcatccacctggctttcgctcaaatctttcggcagccgggcgggcagtttgggtgccgccagctgaatagtcgggtcatccgtccgcagtttttctcggtagcaatactggaaaaaccggcgcagtgagctgagcatccgcgccgaactggtggctttgtaaccgcgatccagcctgccggccagaaaagcctgcaaatcaagggtggtcagcgataaccagtccagatcctgtggtgccagccagtccgccagtgcctgtaaatccaggcgataggatgccagggtgttttccgataaattctgttccagccagatagtatcaagaaactgctctgtcagtgcatcactttcgctgtgttgtacggcgtccttcaccgctgacctcccgtttgaattcccgtgtcagaattaacttatcttctgttacaataccgtaatcctgtgatgaaagcagcgcacagaggcggcgggctttcattttttacccgatacacagcagaataaacagatgaaaattggtcttttttatggttccagcacctgctataccgaaatggcagctgaaaaaatccgtgatattttaggtgatgatctcgttgaactccatgatgtgaaagagacagatctgcaactgatggaaagctacccggtgctgatcctcggtattccgacctgggatttcggtgaaatccaggaagactggctggcggtgtgggagcaactgccgcagcttgatttatcgggaaaaattatcgccatgtacggcatgggtgatcaggtggattacagtgactggttcctggacgccctgggttatctgcatcagcaactgcaatcatccggggtgaaatttgccggttactggccggtggacggttataccttcaccagcccgaaagccctgaccccggacggcaaacattttgtcggcctggcacttgatgacgtcaatcagtatgacgagagcgaagagcgcatcgccacatggtgcatgcaggtacttgaggaagttcaggaactgctgtaggcagatcagatatccgggtactgtaaaagcagctgattaaggctgctccatgcctctttcgggacactgtcagaggctatccacagatatttctgccgcccggaagtcagtgagcgcagatgcagacggatacccagccgggtaatatatggcggtttagtgatttcccactcgcttttacgccataaaatccggttttgattctgcagactggcgggaccggcgcgtttgctgattttatactgtgtccgcccccagcctgcgatcagcagcaatgtcagcggcagccagataaatgaggttctgccgggccagggcgcaaataatacactcagcgccagcgcaccgtaaatcagtgttgagaagacctgagttttaaatgagacacgtaatactgatttccacaaaaccacggcctgccccctctgtatccagacacaatgacagcacccgctgtccggctgagaacccggttataccgcgtccgtcagccggaaaatatacggcattccttcccggtttcctatgaaataactgtgaccggttatgactttctctgccggtcagtccggataatacgctgcgttctgtgctgccatccgtgcctgattacgttcctgaatcagccggattatctgatacagcgcctcatcatccggacggcctttattcatcagccagttaaacagatccgggtccgggcagttcagtaactgcacaaaatcctgtttctgagcatcggtcagcgtgtcatattcatgctgaaagaacggcataatcgcaatatccagctcccgcatgccgcgacggcaggcccagtggatgcgggctttattttcaatatctaacaccggtatatcctttttataagaagcggtttatcagaccggtaaacataactgatgatatcagcgtagcctaccaagccctgacaataaagaaaatcgtctgccgcacatgccggagaaaaatgcgtctcaggcggaaaaataaatgaaatccgcaaccggggatttcattgtcactccgcacgtaccgcatcacacaaagggtcaataatattctcttgcaatgtctgttatctcttttaccatacattgcacagctctccggacaggtaaaacatcatgaacacagaaacaaatacattactcccgcaactgagtgattctctccccctgacacgcatttccctcagcgatctggcgctggtgaccatcaccggcccggacagtcagaagtatcttcagggacaggtcaccgctgatatcgacgctatggctgatgatcagcatgtactgtgtgcccattgtgatgccaaagggaagatgtggagtgatctgcgtctgtttcattataaagacggttacgcctaccttatccgccgcagtgcgctgaatacccagctcgcggaactgaaaaaatacgcggtattttccaaagtgacgattgccgctgatgataatgctgtcctgaccgggatcgccggtcacggcgcggcggaagccttgcaggcgcatttcagcgcagttccggatgcagacactcaggttgtcagcagcaatgacaccacactgctgtatctgccgctgccgcaggggcgttttattctgatccagagcgctgaacaggccggtgctttatctgatgccctgtctctgccggacgcgtctgacactcagtggaccgcactggatattgaagccggttacgccgtgattgatgcagcaaccgtcagtgaatttctgccgcaggcaacaaacctgcaatcccttccccggggtatctgctttaaaaaaggctgttataccggccaggaaatggtggcccgcgccaaattccgcggtgccaacaaacgtgccatgttcacgctgattggtcacagccgccatgtgccgatcgccggtgatgatgctgagcgtcagctgggtgaaaactggcgccgtaccggtaccattctcgcggcagtccgcctgagcgatgatcgcgtgctggtacagattgtgatgaataatgatacggaggaagatgctgtcttccgtatccgtgaagatgaagaaagccgcctgagccttttcccgctgccgtactcctttactgaagaagcctgattccccgtcatccccgggcgcagagatactctgtctctgcgcccgggggtattctgtataaatccgtattgaggttgttatgtcatcagctgttgctgcacaggaagttattcccttttctcagttaatcacctttgttatggagctggataagctcaaaagcgtttaccgcaaaacccgtctgctgaacaatgaacgtcaggaaaactccgctgagcacagctggcattttgccatgacagcaatggcgtttgcgccgtatgttgaagatgcggatatgctgcggatcctgaaaatggcactgctgcatgatgtggtggaaattgacgccggggacgtgctggtctttgatctggccgcccgcgaagcgattgcggaaaaagaagtggctgccgcaaaacggattttcggtctgctgccgcagccacaggcggatgagtttcaggcactgtggaatgagtatgatgccgcagagacccgcgaagcccgtatcgccaatatgatcgaccgcgtgatgccggtgctgatgaatctgcacaacaatggtcagagctgggtggaaaataacatttcactggaacaggtgattgaccgcacgaaatttattgccgatgtgcatccggcattctgggcgtggttacgtgccgaactggataccgcgaagcagaaaggctggctgcgctgataaaaaaggccggttgtgttaccacaaccggccttttctttatcgtttaccgtttactcgtaatcactcatcggtgcgcaggagcactgaaggtgacggtcaccgtaaacatcatccagccgtttaaccgtcggccagtatttgttgtcacgcgttgcctgagtcgggaataccgccacttcacggctgtacgggtgtgaccactccgctgccagttcagtctggatatgcggggcattcaccagcgggttatcttccgctgtccactcgccgctgccgacccgctccatttccgcacggatacccagcatcgcatcaataaagcgatccagctccgtctgactttcggactctgtcggctcgaccatcagtgtgccgccgaccgggaaagacatggtcggagcatggaaaccgtagtcaatcagacgcttggcaatatccatctccgtaataccaaacttcgctttcagcggacgaatatccagaatacattcatgcgccacatagccgttacggccggtataaagcacatcgtaagcggatttcagccgtgctgcgatatagttggcattaaggatcgcgacctgactggcctgacgcagccccagagcacccatcatgcggatatacatccagctgatcggcagaatggaagcactgccgaacggtgcggcagataccgcgccctgagaggtcagcagctcagaggtgacaatggtgtgtcccggcacaaacggtgcga

SEQ ID NO: 79 - DNA, 22892 bp, unknown
  Altogen 322075 strain
  misc_feature (3112)..(3112): n is a, c, g, or t
ggtgttttttcacaccaatcggccccatacccgggccgccgccgccgtgcggaatactgaaggttttgtgcaggttaaggtgagaaacatccgcaccgataaagcccggcgtggtcacgccgacctgtgcgttcatgttcgcgccgtccagatagacctggccgccgaattcatgaatgatatcacagacttcgcgtacaccctcttcatacaccccgtgggtggacggataagtgatcatcacacaggacagattctcactgtgctgttctgctttcgcccgtaaatccgccagatcaatgttaccgtcttcatcacaggccaccaccacgacttccatccccgccatattggctgaggccgggttagtgccgtgagcagactgcgggatcagacagatagtgcggtgcccttcacctttgctttcctgatagcggcggatagtcaccagcccggcatattccccctgtgcgccggagttcggctgcatacacatggcgtcataaccggtcagcaacaccagccagcgggagagctgttctatcatcacatgatagccctgagcctgctccggcgggcagaacggatgcatattaccgaattccggccaggttatcgggatcatctccgcagccgcattcagtttcatggtgcaggagccgagcgggatcatcgcctgatccagcgccaggtctttgcgggccagactgtgcagatagcgcatcatatccgtttcgctgtgatagctgcggaagttcggatgcttcagaatctctccttcgcggcgcagcgcggcaggaatggattcagaagaagcggcaacctgtgcatcgagtgcatcgatatcccacagtgcttcctgtccggtcagtaccgcatacagattttccaggcattcacgctgcgtggtttcgctcagggtaaccgcaacggcacccggcagatcggtacgcaggttgatacgcgccgctttggcacgggccagaacggcagctttgtcctgcacttcaatcgtcagagtatcaaaccaggtggtgttacgcagacgcagacctgcatctgtcagcgctttcgccagaatatcggtcaggcggtgaatgcggccggcaatccgtttcaaaccttccggcccgtggtagactgcatacatcccggcgatatttgccagcagaacctgagaggtacagatattggagttcgctttttcacggcggatatgctgttcgcgggtttgcagcgccagacgcagagcacggttgccggcggcatcaatggataccccgataagacggcccggcatcgcacgtttgtaagcatcacggcaggcaaagaaggcagcatgagggccgccgtagcccatcggcacaccaaaacgctgggctgagccgaagacgatatccgcgccctgtttgcccggcgcttccagcaggaccagcgccataatatcggctgccacactggtgatcacctgacgctgatgtaactgtgccagtaattcacggtaatcatggatctgcccgccggtgccggtctgctgcaacagcacaccaaacacatcatcgtaatcaagggctttttccgcactgtcaatggtcagttcaaaaccgaaatattcagcgcgggtgcggatcacatccagggtttgcggatgcacatcatccgcaatgaaaaagcggttggcatttttcttcttgctgacgcgttttgccatcgccatcgcttccgccgcagcggtcgcttcatccagcaatgaggcggatgccagttccagaccggtcagatcgatagtcacctgctggaaattcagcagtgcttccaggcggccctgggagatttccggctgatacggcgtgtacgcagtataccagcccggattttccagcagattgcgtaaaattaccggcggcagaatggtcggtgcatagccctggccgatgtaagaggtaaattgctgattcagcccggcaatggttttcagttctgccagcgcatcctgttcggttgccccttcacctacggcaggcggggtatccagctgaatatcatccgggacaatatggcgggggggatattcaagtgatgccgcaccgaccgttttcagcatatgctgctgttgttcaggggacgcgccgatatgacggcggataaattcaccccggttttcaagctgcgttaaagtttgagtcattgttctccggttcctgacattgtctgattcaataaaaacccgaaaaaaaaccctgtttgcttacaaacagggttctgcaatccgtcagtcttgttcttcagcctgcagttctgcgtatttggctgcgtccatcagaccggcaaactcatccggatccgtgattttaatgcggatcatccagccgccttcatacggctcgctgtttaccagttccgggctgtcttccagtgcttcgttcacggcgataacggtgccggtcaccggcgcatacaggtcagatgccgcttttaccgactcaacggtaccgaatgcctcaccaaacgtgatttcatcacccacttccggtaattcaacaaaaaccacatcgcccagcagttcctgcgcgtagtcagtgatccctgccacatactcatcaccactctcatggcgaacccactcgtgatcttctgtatatttcagattctcaggtatattactcatcgccaacggctcctgttatcgggtttctcaaaatttaacaataaaatacggatgttcagaccagtgctttgccgttacggacaaatcccggtttcacgacctcaacaggcacttcacggttgcgcacctgtacaatagcggtattgccgatcccctgcgggacgcgggccagcgcgatactgaatcccagtgacggggagaaggttccgctggtgataacgccggtctgtaatttgccgagctcatcagtaaagcggacttccattccggcccgcagcacgcctttttcgcgcatcaccagtccgacctgtttttcagtgccgtcacggcggaatttttccagtgcctcacggccgataaatttccggtcttccggctgccaggcaatggtccagcccatatttgcggccagcggattgacggtttcgtccatctcctggctgntggtttcgtccatctcctggctgtaaagattcatgcctgcttcgaggcgtaaagtatcccgcgcccctaatccggccggtttcaccccggcggccagcagttttttccacaggtcagcggcctgctcagcgggcagcgcgatttcataaccttcctcgccggtgtacccggtagtggcaatgaaataatccccgctctgcacgccgtaaaacggtttcatcccggcgacggcggctttttgttccgcactcagcagtgtcgcaactttttctttggcatgcggcccctgaacagcaatcatcgccaaatcatcacggactgtcatctcagccgcaaagtttttgcgatgttcgtcaatccacgccagatctttttcacgggtggcggagttcaccaccagccggtaaaagtcatctgcaaagtaatagacgataagatcgtcgatcacaccgccggacgcattgagcatcccggtatacagagctttgcctttttcggtgagttttgccacatcattggcgagaagataacggaggaactgctgacattgcggaccatgaaagtccacgattgtcatatgggaaacatcgaacataccggcgtcattgcggacattgtggtgctcttcgatctgggagccgtagtgcagcggcatcatccagccgtgaaaatccaccatttttgccccgcaggcaacgtgctcaccggacagtggtgtgtgttgtgccattctatcccctttcagtcagacatagtgcgcagcgtgtaccgcgcaaacgatacccttttcctgacgttatcaccgaatcacaaacgtaaccataagaaaaaattgtgaccgtgtacgcggacggaaaaatacgagccgtcagtatgcagatttttcatctgccattctgagccctgaggcgcaaaaaagcattaacaggtgatagttttgaattaagcggcgggaatgcactaaaacaccggccggatcgaccggttaatttttagtgcattatgaataaaactaatgtgaaaaaagcccttaaattagattttttcagctgataccggcttcggttcacgcagccagtccggcatatcactcagtccgcgggcatggcgcagcagcgccggtttcacgcccggcagtgtgtctgccagcaccagaccgacatcacggaccagttttttcaccggattgctgccgtcgaacagttcacggaaaccctgcattccggccagcatcattgcggcactctgcttgcggcggcgctcaaaacggcgcagccagaaatagttaccgatatctttgccttcagcagtcagacggcggatttcgccaatcagctctgccacatccataaaaccgaggttaacaccctgtccggccagcggatgaatggtgtgagccgcatcgcccagcagcgccagacgcggtgcggcgaactgacgggcataacgtccggtcagcgggatcgcccgacgttcactgaccacttcacacagcccgaggcgcagatcaaacgccgctgccagtttatggttaaacgcagcctcatccagatccagacagtgctgtgctgtcagtccgggcagagaccagacgattgagcagtgatgtgcatccggcaacggcagaaatgccagaatgccgtcgccgtggaaaacctgacgcgccacattctcatgcggcaactctgtgcggatggtggcgaccagcgcgtgatgctcataatcccaaaacgaaaccgggatatccgcatgctggcgcagccaggaatttgccccgtcagctcccgccaccaatcgggtcgtgagcatgtcgtcattttccagggtgataaaggcatcattttcgccccacaccacctgacggatttgcgtgccggtgagcagcgtcacatcagacagtgtctgcacccgctcccagagcgcgttgcggatcacatcgttctcaatgatatgaccaaggtgctcacaatgagcttccgctgcgctgaacgcgatacggccaaagctgtcgttatcccacacttccatgccctgatacggtgccgcgcgttttgccagaatatcctgccagacacccagtcgccccagtaagcgctcactggcactgttgatggcggagacccggacagcaaacggcgcctgcggatcaaaacgggtatccggcgcctgcttttcaatcacggcgatacgcagcccgcagccgtgcagaccacaggccagtgccagcccgaccatgccgccaccggcaattaccacatcatatgactgcattgtttatcctctttccgtggcggtgttaagcggctgtgcgacccagccgagagtctgttttgccagccggttgcgcagaaacggcagcatttccattgccatcagaccggcattccgtccggcagccagcgggaaacaacgattggagaaaagacgcaccaggctgtcggtcagggtcattgttgcctgccggtcagcctcacgggcggcctgatactgcatcagcacacggtactgaccaatatcttcctgtgatagaaacgcctgactgataacctccgccagtgccatcacatcacgcattcccaggttaaaaccctggccggcgataggatggagtgtctgcgaggcgttacccaccagcgccaggcggtgggaaatctgagagtgcgcggcactcagagtcagcggataacagtgacgggcaccggcagtgacgattttgcccagctgccagccgaaagctttctgtaattcgcggcagaaggtctcatcatcccattcacgcacggcttccgcatgctctgcacggtgacaccagaccagcgaactgcgtccttctgtcatcggcagcatggccagcggcccctgcggggtgaaacgctcaaacgctcgcccctgcggatccagctctgtcatcacattggcgatcaccgccacctgctcatacggggtgtcgctccactgcataccgcattgttgtgcgaccgcagagtgactgccgtccgcagcgatcagaacctgaccgttcagtgttttgccgctgtccagctgaacactgaccgaatccatcgtgcgggtaatactttttacgctgtccggacaatacaacgtgacattttcggcttttgccagttcggcaaacagggtttgcccggcatcatacaactcaatcacctgtccgagcgcatcaatatcataatcaccggcggtaatattcacacagccggtatgcccctgatcagacacatgcacccgggtaatcggagccgcatgcgctttcagggcggaccagagcccgattttctccagccgctgacaggtaccgtacgccagggcaatcgcccgcgcatcaaaccccggatgatggtcatccggtaatctggcttccgccagtgcaacgggaagcctgccgtgactgaggcgggaaagtgccagcgccagtgttgcgccggtcattccgcccccggtgattatcacactcattaattattcagcctgttttgcctgcgccatcagcgcttcaatatcatctgcggttttgaccactgacgcggtcaggttttcgttgccgtccgccgtgatgacaatatcatcctcaatacggacaccaatgccgtgatatgcctccggcacatccgcatccggcgcaatatacagccccggttcgatggtcagtaccatgcccggttccaggatgcggtcgcgttccgtgccgtaatggccgacatcatgcacatccagtcctaaccagtggctgagactatgcatgaaaaatgcgcggtatgctttggtctcgatcaaatgcggcacatccccggtcagtaagccgagttttaccagcccttccgtcatgatttccaccacgcgctctgtcacctctgcaatagaagtacccgggcggtagagttcgagggagacatccagggtttccagcaccagatcatagatttcgcgctgctctttgctgaatttgccgttcaccgggaaggtgcgggtgatatccccggcataaccctcaatttcacatccggcgtcaatcagcaccaaatcgccgtctttcatccggcattcgttttcagtgtagtgcaaaatgcagccattctcgccgctgccgacaatggtgttataggacgggaaacgcgcgccgttactgacaaactcgtgttcgatttcgccctgtaactggtattcgtacatacccggacggcatttttccatcgcgcgggtgtgtgccagtgcgctgactttcccggcacggcgcatgatgtccagctccgccggagatttaaacagacgcatttcgtggacaatcggccgccagtcaataatcgtgcccggcgcggaaaggttacggcggctgccgcggcgcagtgtatcgagagcattaaagacaatggtatcggcatacgccatttcgccctgtgcgaaatagagggtgtcgaggccgttaagcagctggcagagctgttcgttgatttcatcaaacggcagtgcgcggtcaacacccagtttttccggcgcagcatcctggccgagacggcggccgaaccagatttccgccgtcagatcacgaacccggttaaacagaacactgtggttatgggtttcatcacttttaatcagtaccagtacggcttccggctcactgaagccggtcaggtagagaaaatcactgtgctggcggtagggatactcactgtccgcattgcgctgtgccggaggtgccgcaaagaaaaccgccgcgctggccggtgccattttttccagcaatgcctgacggcgtgagataaattcttgtttattcataccctctttccttgtactgtgtgatgattcaggaatctgatggttcagtgtgccgcagattatctgctgcggacagattcagatatatcagtgtaatgtcggtttctgttccggcgcatcagccttttgtgcgctgcgcggcttcgccagcgagatatagcacagctgaaccgcaacgcggacatactcgatcacttcttccagcgcgtcatccagctcttcggcatcttctgcctcatcatagcccagcatgccgatttcccgcagatcagtaacaatttcttttacttccttgcgatcactgaatttcggatccgccacacccagacctaataagaagtgattgacccagccggccagctcatcggcccgggcaaacacacccgcttcatcatccggcagcagtaaattaaactgacattcggtatcatcaagcagttcaaatgtggtattaaagagagcacgcagcggctgtgccagaacctgtgaaaacgccatgccttcgttggtcaggtcgtggatcagtgccagccagctgtcatctgtgttaccgccgcagagcagacccgtgatcaggccgtgcatctctgacgcggtcatggcaacggcctgctgacgcaaaagttcatcaagtgttttaaaatcgggcagtgttttatccggggtcattattttgctcaccagtcgggtttcagttcatgatatgctaccatcaagaggcgccgctgtaccagataagggctgcggcctgctgctataacgtacacaattcacgtcacacaggataatatcctgttgcagaaccaaaggaagatttcatgtctgcacaacccgttgatatccagatattcgggcgttccatgcgcgttaattgtccaccggaacaaagagaagctctgctcgcttctgctgcggagcttgaacaacggttacaggacctgaaagaacgcagccgggtgtccaacacagaacagctcgtttttatcgtcgcgttaaacatctgtcacgaactggcacaagaaaaattgaaaacgcgcgattatgcctataacatggaacaaaagataaaactgttacagcagactatcgagcaggcgctgcatgaccaaacccgaatcactgagcgccaggtaacacctattgaataaaattgtttagaaatcagtcactagacaaaaaaaatttcgaaattaggttgcaatatctgcccgatttcatacaatgagtttaagaacaacgttacacgaagttcacaaaattctctgagatgtttgtctgcgggtcagtcccctgagccgatattgatacagacagaatgtggtgatttgtcaccggtgagcatacctgattcgttcaggcagcctaatggaagcaacaccgcgttcaccttgaaccaagggttcaagggttacagcctgcgacggcatcttggagacctctctcttcttttatctcccgatatttcgctgatttcactatgactcatgacccgttgttacaagcgcggcatcatctgcgtcagttaatccgcaacaagcgccgtgcgctgacacctcagcagcaaagcactgccgcacaagaccttgttcagcaaatcattcatcaccctggtatacaccgcgccggtaatattgccctgtttctctcttttgatggtgagattgatacccgtccgctgacagagtggctgtggtcacagggaaaacaggtatttttacctggtcttcccccgttcagccgccatcatctgttattccttgcttatcgccctgataccccgctgattaaaaacaaattttcaatttcagaaccggcgctggatgtcacacaggtattaccgccgcaggaactggatattatgtttattccgctggtcgcgtttgatgaaaaaggagagcgtctcgggatgggcggcggtttttatgaccgcacactgactggctggcagaagaaaggattttacccggtgggactggcacatgattgtcagcaggttgatgaacttcccgccgcacagtgggatgtcccgctgccggaagtgatcacgccatcacgccgctggctgtggccggaacacaactaaacttgaataaacatacggttaattaacagaaagatacaccattcacacattgactccggtgaaactgccggtaacgggcaaaacgaaaagtcgctgtaaatacatccctgtaagctcaggcgcgtcatccatgacgcgcatgcttttcgttcgcctgcccgttaccgtccgtttactttaccttcagtcgttctgttatcagaacaacagacgcgctctgacagttcccggcagcgctttcagctgcagcagaacgtcgtcagcttcatctttgttattcgccacaatgtcgataaccacatagcccaggtcacccgccgtccgcagatactgcgcagcgatattaataccgcgatcagtaaagacctggttgatgctggtcagcagtcccggccggttttcgtggatatgcagcagacggttggcattctggccatgcaccggcagtgacacttccgggaagttgaccgcagagagcgtcgaaccgttatcggaatatttcgccagcttaccgccgacctcaaacccgatattttcctgtgcttcctgagtggagccgccgatatgcggagtgagaatgacattatcaaacccaatcagctcagaaataaacggatctgccgggtcattgttggccgccggttcagacgggaacacatccaccgccgcgccggacaggtgttttgatgccagtgcctgactcagagccgggatatccactactgtgccgcgtgaggcgttaataaaaattgcccccggtttcatcagctcaaactcatgtttaccaatcatatttttggtggattccgtttccggcacatgcaggctgaccacatcactcatattcagcagctcagacatatggcgcacctgagtggcattgccgagcggcagtttgttttcgatatcgtaaaaatagacatccataccgatggattccgccaggatccccaattgcgtcccgatatggccgtaaccgataatccccagctttttaccgcgcgcctcgtagcagccttttgcctgtttatcccagataccgcgatgcgctttggcattcgcctccggaatacggcgcagcagcagtaataactggcccagcaccatctcagccacggaacgggtgtttgagaatggcgcgttaaagaccggaataccgcgttttgccgctgcatcgagatcaacctggttagtcccgatacagaaacaaccaacggcgaccagtttttccgcacaggcaaaaatctcttccgtcagttgggtacgggatcggataccgataaagcgtgcatcacggatcgcttcttttaattcttccgtggataatgcgcctttatgatattcaatatttgaataacccgctgctttcagactgtctaccgcactctggtgtacgccttccaatagcagaaatttaattttatctttttccagtgatacttttaccatgaccctgccttttgttaagttcccgaaatgtcctgtcctcacatcaaaataacaaaaaataacgtctccgcaatacacgctcctgtataagtcacagaacaagtcacagggaaaaggcaggtttacaggagaaaatgaaaaaatgccgctgagagctgatattttggccatatcaaagacaaaattgtgatatatatcaccgaaatttatgattttaaaaaaataaaaaaaggaaccgtttccggttccttattcagcatctgaatatgacagatatagtactgatttatttaatggtttttacgccatcctgagtacccatcagcaccacgtcggcaccacggttagcaaataaaccaacggtcaccacaccggcgataccgttgattttattttccagctcaaccggattcagaatttccaggttgtagacatccagaatcacgttaccgttatctgttaccacattctgacggtattccggctgaccaccgagtttgaccagctcgcgcgccacataagaacgtgccatcgggatcacttccaccggcagcgggaatttacccagcacatcaacacgcttactttcatccacgatacaaatgaatttcttcgcgatagccgccacgattttctcgcgggtcagtgccgcgccaccgcctttgatcatattcatgtggtggtcaatttcatccgcgccgtcgacatacacgtccaggctgtccacatcattgcagtccagcaccggaatgccgtagcttttcagtttttcggttgagaccacagagctggataccgcgccgtcaatctggcctttcatggttgccagtgcatcaataaagtgagatgcggtggaaccggtgcccacaccgacaatggtgcccggcttcacgaattctaatgctgcccagccaaccgctttttttaattcatcctgagtcatgttcttgccttttcgtcgtcatcctatgccaccggcatagcccgcgataattatagcaattatttctcccccggaatgcgaattgtggcatattgtgaatgacttataaaaaagaggagaaaaccgccatgagacgaccggattatcgtgccctgcaggcgctggacgctgttatccgtgaacgtggttttgagcgggctgcacagaaactctgtattacccagtctgccgtttcgcagcgcatcaaacagctggaaaatctgttcggacagccgctgctggtgcgtaccgtgccgccgcgtccgactgaagaaggccagaaactgctcggtttgctgcatcaggtggaattactggaagcggaatggctgggcgatgatgccgggaatattgagccgccgctgatctctctggcggtcaacgccgacagtctcgcgacctggctgctcccggcactgcgtcatgttctggcggatctgtctatccggctgaatattcaggtggaagatgaatcgcggacacatgaacgtctgcggcgcggggaagtggtcggtgcggtcagtattcagccgcgtccgctgcccggatgtctggcggatcagcttggcgcgctggattacctctttgtcgcctcaccggaatttgccgcccgttatttccctgatggtgtcagccgcagtgccctgctgaaagcccctgccgtggcgtttgattatctcgatgatatgcatatggcctttttgcagaccaattttgacctcgctcccggcagtgtgccgagccacgtactcaattcttcggaagcgtttgtgcagctggcaaaacagagttcagcctgttgtatgatcccgcatttgcagattgcggatgaactggagcggggagagttgctggatctgacaccggggctgtttcagcgccggatgctgtactggcaccggtttgcaccggaaagtgccaccatgcgccgggtgactgacgccctgctgaaacacgggcgtcagaccttacggcaggagcagcctgaaacggcttaacgtttcagttcaaatacgacatccacctggtcgcggaaatcgatagtctgctgttcataggtttcatccgcagatactgctgtcggtgcatcggtggccagcatcaatttattacgcgccattaccggaaccggctgtggtgcgttgtaaccgatgctgtaaaccgcacccagctcagtaccaaagccttttgcgaccgatttggcttgtgaaatcgcatcagaaatcgctttctggcgtacttcttcacggtatttctccggattattcaccccgaactcaacggcactgatatcattcaggccgcttttcagcgcaccgtcgagcagtgtgttcagtttgttcaggtcatgcactttcactgtcacagagcgggacgcattataaccacggataacggactcttctttctctttgtcatagacataatccggactggtactgatattggccgcattaatgtctttcttttcaattccctgtgctttcaggaaatcaaaatactgcgccacacgtttatctgcctgtgctttggcggctgacgcatctttttcctttactgtcacattgatggacagtgtcgccatatcaggctccgcctggatcacagcgctgccggaggttgaaatatgcgggcctgccggcgtttccgctgcctgagcagctgccgcgtaaccacccagggcaaccatagcggcaagagcaagagatttcagtttcacatatcctccttctgttttaaaccggtcacataacaggatgttatgccggaatcagtaacactaccacactctgacgaaacaatatttcggattaataagaaatattcaatccttttaaggctaattgtatcgcgatataccacatcaccgaaccgacaaacagattgataatccgctgtgataccggcttttgcagtaccggggagaaccaggccgccagcagcgccaggccgaagaaccacaatattgatgcacagactgccccggcggtgaaccagatccgcatatcagaaccgagttgcccgccgatgctgcccagcaccacaaaggtgtccagataaacatgcggattcagccaggtaacagccaccagcgtcataatcacccgccagcggctgcggaccacctgctcctgcatggtcagcgcagtatcagcggtaaagaccgcccgcaatgccccccagccgtaccacagcaaaaacgccacgccgccccaggtaaccagcgccatcagccacactgactggctcagcagcgcactgccgccgaaaaccccggctgtgatcagtaaaacatcactcagcgtgcataaaaatgcactcatcagatgatactgtttacggctcccctgctgtaatacaaatacattttgcggtccgagcggcagtatcattgccgcgccgagtaataacccttgaaaataagtcgataacatgcaaaaaatcccgataattattcaatccacgccggatggaatgaatattaccgggatttcagtattagtgaaattaatacaattaatggaccattactgcggctaataacacacggagaaatactgtcagatccactcccagaccagacgcaccggtgtaccgagacattcactcacacggcggataatttcatcgcgcccgttatccatgcagacaataaagctgttgttatagcggacggtcagcccgtaacacgcaagaccgccggtttcatcataatccatatcaggaataacaaccggcgccccgcagcagggggtattgcgtggtgtcagcgccgcagaaattcgcgcctgtccggtgaccgcaaaaatcgcattcatctgtgcgccccaccagacaccggaaaccggcttacggcagacagggcaaagcggataacggaaattttcactgccggaccagaacataacgtccggatccgcctgatgcataatatcgtcagccgccatccactcactcagatactgctccgcagcctgttgctgctcagcatccgggatataactcagtgtctcaggaataaaatgaagtaaatgctcgctcatcataatctctcacagtacggcaaaaaaaagcggcacccgaaggggcaccgctgataatatacacctgttacgcctgtgtttgctgactattctgatgcatatgcacatcaagctgcgggaacggaatgccgatattatgtttatcgagcgcgcgcttgaagttttccagcagatcccagttcacatccgcgaaatcaccgttcttcgtccagtaacggacgataaaattcagagaagatggtgccatttcattaaggcgcaccacgatacctttctctttctggactcgcgggtcagccgcgacgatctctgtcagaatctctttgacctgatcaatatccgcgttgtaggccacaccgacaataatgtcacggcggcgatccggttcacgggtcacgttaataatatcgcccgcaatcactttaccgttcgggatcacaatgattttgtcatccgcactgcgcagtgtggtggaaaaaatctgcacattctgaaccgtcccttctgacgcgccgataaccacatattccccggcacggataggacggaaaataaccagtaacacacctgccgcaaggttagagagtgaaccctgcaatgccagaccaacggccaggcctgccgcaccgagcaccgcgataacggacgcagtctgcacgccgagacgccccagcaccgcaatcagagtgaaggcaataaccgcataacggaccattgcggacaggaaatcagagacggtgacatccacaccgcgcatcgacagcaggcgggaaactgctttagcggccatttttgccacaaacagaccaataatcagggtcagtacggcagccacaatattcaccgcataatccagcagcaatgcctgattatttgccagccagccggtcgcctgattcaggctgtccgtcaggatttgttcattcattcatccacctcataagttaccggaaataaagaaaaacaatattgttgcgataaccggccgattatcgctccaagtgaataaccactggtttatattaccgtaacaaatgaaaatttcagaataaaaattctcagccctgcccgccggtcacaataaatttacgatagttttccagtaaaatcataaagtcagctgtgccgcagaatgcaatactttcattatcgtaataactcatgccttcgtccggctcatctgtttcaaaggtaatctgattcgcgttaatcatgatttcctcatcatccatcagcaaagtgtattcatgccccactcgctgccactgttgttcccgccctttaatactgtcaaatgccacggttatctcatcaatcaccgagagatcccctttcacttcttcattcagccagtgaccgatcgcttcgtgatccattgacagcttaactatcacgttcccgtcgatcccgagggaaaattcataatccatcgctgtatacctcttgttaatgctttaccgctgtcacgtatgcaacacctgctcttattttagcgggttatcccgtttccaggtacattgataccgtaattaaccggataacaggtataaaaaaacgggagacagtggttactgtctcccgccggtgataaaacagcggactgattcagatgctgactgtcacacctgagtctggaaaatcacgccatccgcgactttggtgtactcattcagctggtcaaagttgaggtaacggtaggtatcttccgccgtctcatccactttatccataaaggtctgatactccgccggtgtcggtaaacgccccagcagggaagccaccgccgccagttccgcagaggccaggtacacatcggcaccggtacccagacgattcgggaagttacgggtggaagtggaaacgacggttgagttatccgccacacgcgcctggttacccatgcacagtgaacagcccgggatctcaacacgggcaccgctcttgccgaagatgctgtaatagccctcttctgtcagctgagcagcatccatcttggtcggtggtgccacccacagacgggtcggcagctggcctttatgactgtcgagcagtttacccgcagcgcggaagtgtccgatgttggtcatgcaggatccgataaagacctcatcaattttactgcctgccacgtcagacagcagacgtgcatcatccggatcattcggcgcacagagaatcggctctttgatatcattaaggtcgatttcgatcaccgctgcgtaatccgcatccgcatcaccttccagcaactgcggatccgccagccatttttccatgctctgaatacggcgctcaatagtacggcggtcgccataaccttccgcaatcatccacttcagcagaacgatgttggaattgaggtattctgtgatcggcgctttatccagtttgatggtacaacccgccgcagaacgctcagcagaggcatccgccagctcaaacgcctgttccactttcagtgtcggcagaccttcaatttccaggatacggccggagaaaatatttttcttcccttttttctccaccgtcagcaggccctgctgaatagcgtaatacgggatagcatgcaccaggtcacgcagtgtgatccccggctgcattttccctttaaagcgcaccagcacagattccggcatatccagcggcatcacaccggtggcggcagcaaaagcgaccagaccggaaccggccgggaaggaaatcccgatagggaaacgggtgtgagagtcaccaccggtaccgacggtatccggcagcagcatacggttcagccaggagtggataataccatcccccggacgcagcgacacaccgccacggttcataatgaaatcaggcagggtgtggtgagtattcacatccaccggcttcggatatgcggctgtgtggcagaaagactgcatcaccagatccgcagagaaaccaagacacgccaggtctttcagttcatcacgggtcatcggcccggtggtgtcctgagagccgacagaggtcatcttaggctcgcagtattcgcccggacgaacacccgccacgccgcaggcacggccgaccattttctgagccagcgagaaaccgcggctgcttttctcaaccggtttcgcctgacggaaaatatccgtatgcggcaggccgagagactcgcgtgctttggcggtcaggccacggccgataatcagcgggatacggccaccggcgcggacttcatccagcagcacatcggttttcagttcaaatgtcgccagcagttcattggtgtcatgattgcggatctcacctttatacgggtaaacgtcgatcacatcccccatattcaggttgctgacatccacttccaccggcagcgcgcccgcatcttccatcgtgttgaagaaaatcggggcaattttaccacccagcacgataccgccgccgcgtttgttcggcacatacgggatatcatcccccataaaccacagtacggagttggtcgcggatttacgggaagaaccggtaccgaccacatcaccgacataggccagcgggaacccttttttgctgagcagatcaatctgattaaccggaccgatattgcccggttcatccggatcaataccgtcacgcgggtttttcagcatcgcgagagcatgcagcggaatatccggacgtgaccaggcatccggtgccggtgacagatcatcggtattggtttcaccggagaccttaaagacggtgacggtcagtttttccgccagttgcggacgctccaggaaccagtctgcatcagcccaggactgaataattttctgtgcataggaattaccggcttttgccttttcttccacatcatagaaattatcgaacatcagtaaagtatgagagagtgctttggcggccacaggggccagtttttcgttatcgagggattcaatcagggcgtgaatattataaccaccctgcatggttccgagtaattcaacggctttttcagcggtgatcagcggtgaatgtgcttcaccttttgccagagcggccagaaaaccggctttcacatacgcggcttcatcaacacccggcggtacacggttggtaatcagatcaacaagaaacgcttcttcgcctgccggcggagatttcagtaattcgactaactcagcaacctgagcggcttccaatggcttaggggcgatcccttgtgctgcacgttcggcaacgtgcttgcggtaattttccagcacgacgtactccttgctttgtgttttttatgagtgcccggcaacggggtttcagcatatcaaaatttaaacacattgttaattcattcacattaaagcaacataaacaatttgtgagctgaataacattagtgaattaaacttgctgcttacccgtttcaccagtgttatgccgttttaaacaggaatctgcacgattattgattacgccggaaatgcaaaaaacggtcgtttgcgtagttctgctgcaccgggaacggcggtcagcacgctgaaattattaatatctgaataataccggtttgtctatgaatacacaggcgggtgctgacagcagggaataaaaaaatccggcgccaaaggcagccggatttttatcttcagccgggtaacaacacggttaccggatcagctgattactttttctttttcgctttcggattcggaaggtcagtgatgctgccttcgtaaatctcagccgccataccgattgattcgtacagcgtcgggtgagcgtggatggtcagtgccagatcttccgcatcacaacccatttcgatagccaggccgatttcacctaacagctcgcctccgttagtaccgacaatcgcaccaccgataacacggtgagattctttgtcgaaaatcagtttggtcataccttcagcgcagtcagacgcgattgcacggccggaagctgcccaagggaaggttgctgtttcgtagctgatgcccttctctttcgcttctttctcggtcagaccaacccatgccacttccggttcggtgtaggcaatagatgggatcactttcggatcgaagtagtgtttcagaccggagataacttcggctgccacgtgaccttcgtgaacacctttgtgcgccagcatcggctgaccgacgatatcgccgatagcaaagatgtgcggcacgttggtgcgcatttgtttgtcaacgtggatgaaaccgcgatcgtcaacttcaacaccggctttatcagccgccagcagtttaccgttaggggtacggccgatagccaccagaaccgcgtcgtaacgctgtggttctgcagggcctttcttgccttccattgtgacatagataccgtcttctctggcttcaacggcagtcactttggtttccagcatcaggttaaacttagagctgatacgtttggtgaacagtttaacgatgtctttgtctgccgcaggaatgacctggtcaaacatttcaacaacatcaatctgtgaacccagcgcgtggtatacggtacccatttccagaccgataataccaccacccatgaccagcagacggcccgggacggttttcagctgcagtgcatcagttgaatcccagacacgcggatcttcgtgcgggataaacggcagctggatcgggcgtgagcccgcagcaataatcgcgttgtcaaacgtgatagtggttttacccttctcaccgtcgacttcgatagtatttgcgccggtgaactggccgagaccattcacaacagtcactttacggcctttcgccataccggccagaccgccggttaactgagaaataactttctctttccacagacggactttatcaatatcggtctgcggttcgccgaacacgatgccgtgagaagccagcgctttcgcttcttcgatcactttagcaacatgcagtaatgcttttgacgggatacaacctacgttcaggcagacaccgcctaaggttgaatagcgttcaatcaggacagtttccagacctaagtcagcacagcggaaagccgctgaataccctgcagggcccgcaccaagtacaacgacctgggctttaatttcagtactcatcgtgacctcttaattgtttgtccggcgggtcagacgacatatattccaccgggacgtacacactgagagcagtttacaaaattgttaacaacctggaaaggcgcagttctgtgacctgactcccgttatccgggatgagcacgtttcagcctgcgccactgagaccggctctgcaccggtctcagtgtaattgcttacatcgccaggcggcgtaaatcgctcatgtactgattaatcagcgtgatgaagcgggcgccgtcagcaccatcgatcacacggtggtcgaaggagagtgacatcggcagaatgagacgcggaacaaactgtttgccgtcccataccggtttcatggatgaacgtgacagacccatgatagccacttccggtgcgttaacaatcggtgcgaaaccggttgtcccgataccgcccaggctggaaatggtgaagcatccgccctgcatatcagaagaagtcagcttaccgttacgggctttcttggagatttcagccagttcgtaagacagttccagaataccttttttgttcacgtctttaatgacaggaacaaccaggccgttcggggtgtctaccgcgataccgatattgacatattttttcagaatcagacgctgtgcatcttcagtgatagagctgttgaaacgcggcatttcgaccagcgctttggcagcagctttcatcacgaagaccagcggagtgattttcacgcccagctgtttcttctcagcttctttgttctgctgtttgcggaattcttcaacatcagtgatgtccgcttcgtccatcagcgtaacgtgcgggatcatcacccagttacggctcaggttagcgccggacagtttctgaatacggctcagttcaacttcttccacttcaccgaacttgctgaagtccactttcggccatggcagcatgccaggtaaaccgccgcctgctgcagccggagccgcttcagcgcgtttcaccgcatctttcacataagcctgaacgtcttcgcgcaggatacggcctttacggcctgtgcctttgactttcgccagattcacaccgaattcacgggccagacggcggataaccgggcttgcgtgaacgtaagcgtcgttctcaacgaagtcattacccgcagccggagctgctgccggagcggctttcgctgccggtgcagacgcaggtgctgcggccgcaggtgcggctgctgcaggctgtgctgccggagcaggtgctgcacccgctacttcgaataccatgatcagagagccggttttgactttatcgccgacagctactttgatttctttaactttaccggccatcggagacgggacttccattgaggctttgtcgcc

SEQ ID NO: 80 - DNA, 38419 bp, unknown
  Altogen 322075 strain
gtcatgttacgggtttcgccgtagaatgctgccaggtacaggttgttagcgtcgtatttcgcacccagatcccatgcttcagcacgtttaccgtgagcagagctgtcgaactgctggtccagagtacgtgcagagttagcgtatgcaccaccaacgcttacgccccagccgaggtcataagtagtggagaaaccgtagccgtcgccgttagctttagcgcctttctgagattcgattgagttctcgtcgttagcaccctgatactgcagagcgaagttcaggccatcaacataaccgaagaaatcgctgttacggtaggtcagcaggttgtggttacggctggtcatgtaaacgtcagactgtgcctgagtatcaccaccgaacagaggcataacgtcggtccatgcgttgacgtcatagataacaccgtagttacggccgaaatctactgaaccgaattcagcgaatttgaaaccagcgtaagctaaacgaacttcgttgttattctggccttcagtaccacgggttttgatttcgttttcgaaacgaccgaaaccggtcagttggtcagtgatctgagtttcacctttgataccgaaacgaacgcgtgagctgtcgccatcttcgccgcttttagcgtctgcgaacatgtgacgaacgtcaactttaccgtacaggtctactttgttgccgtctttgttgtagatttcagctgcgtttgctgcaccagcaactaacagagccgggataaccactgcaagaatattgcgtttcattattattaccctcattggtgttattcggacccctgccactgccagaaatagttctgaaaaaaatttggaactatttatgagagtttagtgtcgtctgtgtcggcgaccagtgttccattggtaaaatattttatctaccctgaaagtgctacaaaaacgaagaatctgtaacaaatggcaaaaaagtatttcaaaatgtaaataatcgggaactttttgaacagtcagatcatcagacataaaaaaagccgacctgaaggccggctttttacattcaatatttttgatggaaatcagaatgtggcgctgcgcggggtgcgcgggaacgggatggtttcacggatatttgagacacccgtcacatatgataccaaacgctcgaaacccagaccgaaaccggcgtgcggcactgtgccgtagcggcgcagatcacggtaccaccagtaatcttctttattcatacccagttcatcaaagcgggcatcgagtctgtccagacgctcttcacgctgggaacccccgatgatttcaccgattcccggtgccagcacgtccatcgctgccacggttttgccgtcttcgttttcacgcatatagaaggctttgatagctttcgggtagtttttaacgaccacaggcgctttgaagtgctcttccgccaggtaacgctcgtgctcagaggacatatccacgccccagtacacgtcgttttcaaaggttttgccgcagttttccaggattttgatcgcgtcggtgtaatcaacctgtgcgaaatcggaagtgacaaaacgctccagacgttcgattgcttctttattaatacgctcagcaaagaattcgaggtcgtcgcggcgctcttccagaacggctttgaagacatatttcagcatggcttcggccagaccggcgatatcattcaggttggcaaacgccacttccggttcgaccatccagaattccgccaggtggcggctggtgttggagttttccgcacggaatgtcgggccgaaggtgtagattttgctcagcgcagaggcataagcttcaccgttcagctgaccggatacagtcaggaaggcttcctggccgaaaaagtcttcactgaaatccacttcgcctttgtcgttacgcggcaggttgtggaaatccagcgtggagacgcggaacatttcaccggcaccttcggtatcggaggtggtgatcagcggggtggatacccagaagaaaccctgctcgtcgaagaaacggtgtaatgcctgggataaggtatgacggacacgggcaaccgcgccaatcaggttagtgcgcggacgcagatgcgccacttcacgcagatactcaacagagtggcgttttgccgccatcgggtaggtatccggatcatcaaccataccgaccacacggacctgtgaggcatggatttcaaagctttgtccctgacccggggaagcaaccactttcccggtaacttcgacagaacagcccgccgttaaatgaagcacttcatcattataattaggtaaattattttcgatgacggcctgtaccggattaaagcaggaaccgtcgtagacggcgaggaatgagatcccggcttttgaatctctccttgtacggacccaaccctgtaccgtgacttcgctgtcaacaggtacacggccttgcagtacatcgaccacaggcgctatgctcatagttgaaactctctcttcttatatataggtctgttacacgcgttacccgccatcctctgagatgtgagtaacagaatagtcatcagttgccgtcaaacgggcaatctcactatgttacttgctcactctcaggaaacaagcagaaattagggggtaacagcccgaaaaacagaaaaaataaccgtctttttctgttctccgggagcaggtatataaaaggagggatcagcaggcgcgctgaacgtggggaatatcaaatgcgcggcgcagtttatcgacaaattcatcatcttcgcagatggtttttccggggctgtcagagagtttggcaaccggtttaccgttgcattccaccagcttgataacaatattgagcggctcgacatccgggatattgcaggtcaggcgggtgccgataccgaacaccagatttatccggtcacagaaatgggcataaagcgcgagggctttgcggaaatccaggttatctgaaaagaccagggttttgctcatcgggtcgatacccagcttttcatagtgagcaatggctttttcaccccattccaccggatccccggaatcgtggcgcagaccctgataggcacgggcaaacggggcatcgaaatcgcgcaggaaagcatccatcgtgatgcagtctgttaaggcgacaccgagctgatccggatattcatcaagccaggtctggagggcagcgcgctggctgttggccagttccgcactgatctgctgatgtgcctggaaccattcatgtgcctgggtgccgaccggctccagatcgagtttttccgccagcaggtaattgctggtgccgaccagatacgggaaatgctgtttcagttcagtgacaatggctttctgaacatcaaaagagaaacggcggcgggtaccgaaatccatcagtttaaatcggctgagatccagcccggcctgctctgcatcctgataaaaacgcgccaccagctcacgcagacggataacagcatcttccggcgtgacctgcggtgattcatgatggtggacgagttcactgatcagcgccagcagcggcacttcccacaggataacttccacccacggaccgctgatacggacagccagctggccgttgctgtcacagcggatatttacctgtgacggatcaaaacggaactgacggaaccaggcgaggtagtccgccgaaaaaaacggcaggcgggccaggtagttgtactcgtcatcactgactgacagctctgccatcattgccacccggcggcgcagttcatctgcgtactgccccagccgtttgctgctccggcagcggaattccgcgaccacaggaattgagcggtaatgatggaacactgcctgctgcatatgcagcttatacgcatcggtatccagcagtgatgtgataatcggggttgcttctgaattcatggcgctttcagcatcctcacggagcaatcaacctaaacaggttatagcttactattatctgcgtatagtaacacgttattttccctgtgcgtgatgttcagcgcgcaatcacattatttgttaacattttattcatatttagtactgtaccgcaccgtcaggaaatcagggtgtatcacaaactgctaaaatttcgtttaccacggcgcctgaattatgagagcctaagtacagcgtaattgtaatcatttaataaaacagtgaagagaaaaccatgacacaacagcggcaggcgaagtatcgtcaggactatcaggctcctgattataccattacccatattgatctcgattttgcgctcgacccgcagacgacagtggtgactgccgtcagtcaggtgaagcgcctgaatgacaacgcctctgagctggtacttgccggtgagggactgaccctgaagcaactgaccattgacggcaaagtctggtcagattaccgcgaagaacccggttcgctgcgcattatgaatgtgcctgaacaattcaccctgcaaattattaatgaaatcagcccggcggaaaataccgcacttgaagggctgtatgtgtccggtgatgcactctgcacacagtgtgaggcggaaggtttccgtcatatcacgtattaccctgaccgcccggatgtgctggcgcgttacaccacccggatcacggcggataaagcccgttatccgtatctgttatccaacggtaaccggattgatgccggggaatccggggataaacactgggtgaaatgggaagacccgttcccgaaaccaagctatctgtttgctctggtggccggtgattttgatgtgctgcgcgatacttttaccacccgcagcggccgtgatgtggcgttggagctgtttgtcgacaaaggcaacctcgaccgtgccggctgggcgatgacctccctgaaaaatgccatgaaatgggatgaggaacgctttggtttcgagtatgacctcgacatctatatgattgtggctgttgatttcttcaatatgggcgcgatggaaaacaaagggctgaatgtctttaactccaaatatgtgctggcgaagaatgaaacagcgacagataaagattatctcggcattgaatcggttatcggccatgaatatttccataactggaccggtaaccgcatcacctgccgtgactggttccagctcagtctgaaagaagggctgaccgttttccgtgaccaggaattcagttctgacctcggttcccgtccggtaaaccgtatcaataatgtccgcgtgatgcgtgccgctcagtttgccgaggacgccggtccgatggcgcacccgatccgtccggataaagtcattgaaatgaataacttctatacgctgacggtgtatgagaagggctctgaagtgatccgcatgatccacacgctgctcggcgaagagcagttccaggcggggatgcagctttatgttcaccgccatgacggcagcgccgcgacctgtgatgattttgtgcaggcgatggaagatgcgtctaatgtcgatctgacactgttccgccgctggtacagccagtccggtacgccgctggtgacggtacgtgacagctatgatgcggataaaaaacagtatcagctgcatgtgacccagatgaccccgccgacaccggatcagcaggacaaacagccgctgcatatcccgtttgatattgaactgtacggcagtaacggcgacgtgcttgcgctgcgtcatgaaggggagccggttcattctgtactgaatattacccgtgatgaacagaccttcacctttgatgatgtcagtgaaaagccggtaccgtcactgttccgcgaattttccgcgccggtgaaagtggattatccgtacaccgatgcacagctggcatttctgatgcagcacgcccgtaatgaatttgcccgctgggatgccgcacagtctcttctggcattacatataaaggaaaacatccgccgttatcaggccggtgaagacttgcaattaccggaaggggtaaccgatgctttccgtgcagtgctgcttgatgagcagatcgatccggcactggccgctcagattctgaccctgccgtcagaaaccgaggttgcggaatggttccctgtggtggatccggatgcaatcaatgcggtgatgacctttatcgccggcacatttgcccgtgaactggcggatgagctgtatgcggtgtatgtcagcatgaaaaccggggcataccaaatcgatcatgcggatattgcaaaacgcgatctgcgcaatgtctgtctgggctacctggcactggatgaggacaaagcgcaggcagataagcgcgtgtcacaacagtatgcgcaggccgacaatatgaccgattccctggcggccctgaccgcggcggtaaaagctgcactgccgtgccgcgataaactgctggcggattacgacaacaaatggcaccaggatggtctggtgatggacaagtggtttattcttcaggccacacgtccggatgcggatgtgctggacaatgtgaaatcactgctctctcaccggtccttcaccatggcaaacccgaaccgggtgcgctcgctggtcggtgcgtttgtgatgaataacccgaaagcgttccatgataaatccggtaaaggctatgagttcctgacggagatcctctgtgatctgaacagccgtaacccgcaggtggcgtcacgtctgatagagccgctgatccgcctgaaacggtatgacgacagccgtcagagcaaaatgcgtgatgcattgctgcgtctgaaagggctggaaaatctctccggtgatctgttcgagaaaatcaccaaagcactggatgagaactgatcgttgaaacttctccggggaaatctgttaccccggggaagatccggataacgggcaaaataaaaagacgctgtaaatatgtccctatacgctcaggcgcgtcatccatgacgcgcatgctttttatttctctgcccgctatccggatgattgcattggcattgttacagacaaaacacctccccggaggtgttttttttttgcacagcaatacattgtcacagtaacagggcgttatttttaaccggatacggtaaactcaggccaatgacgacctgtatataaaagaaaggatttcgtgatgagaaatgaaataaactggtgcagtcgctggttacaggggatattttccctgtttttgctgctttttgctgtgacggcatttgctcagacggagacatttccccgtatgcagggatcggtcaccgataccgccggattgctgaccgccggtgagcgcagcagtattgagcagaaactgaatgcactgcgcgagcggaccggtacgcagattgcggtactgacggtgaacaccaccgggtcgcgcgatattgaaagttatgcggaaaaagtctttaaccagtggcgccttggccgtatcaatattgatgacggcattttattgctggtggcgtcagatgatcgcgcgatgaggattgaggtcggatacggactggaaggggcggtgagtgatgcggtggcaaaccgtattctcaaggattatttcattccgaattttaaaatggggaattatgccggtggtattaatgataccgtcgatgcgctgattgccagagtccgcaatgaaccactgccaccggttaccactccggcattctttattgccaaacaggcagggcccgtcggctggattgatattgtgcttggtgcggtactggctgcgagtgcatatctgtggggcgctttcctgtatggcatggtgaaacgctttaaactgaaagcggcaattccgatcgccattattctttatctgacctggtacgccggcggctttaataatccggccggaaacggtattcatttcggggaagattttctctacacagaattaccgcgctggagtcagttcctgttcctgcagattctgccgttctggctggtgatagtgctgacattcaccatgtttatcgcggccttcttcttattcctgcttacgctcggcggattgtactggatactgacgaaaatcgtccggcctcagaaactgcgggtttcaatctgtgttggttttctgttcggcggatttgcttttattttcggattactgttttcagaggggagtctggccgccggtgtggtggcgggagtgggattcggcatgtttgtcgggatcgggcactatttcggttttgttactgtcggcggcggaggcggtgggggttcaggtcgcggaggccgtggcgggggaagcagcggcggtggttacagcgggggcagccggagcagcagttcctcatccgggggcggcggtcgcagcggcggcggcggggcatccgggcgctggtaagctgacagtaaatggcgcacaaaaagtgtgcgtcatttactgcgtaaaaaagccgtgcagaacggacgcatttcacctattatagccgcctgagataggctcccgctgtttcagctatgattcacgacctattttgttacagagaaattgcccggtacggcgtgttgtgccgaaaacacatatctatagcaaaaggtatttaagatgtattatccgctagtcaggaaggccctgttccgccttgatccggaacgcgcccacgaattcacctttcaccagcttaaacgtctttcccgctctcccttccgttttcttattcagcagcatgtcgccaccaaacccgttcagtgcatgggactctcttttaaaaacccgctcggattagccgccggtcttgataaagacggtgaatgtattgaagcatttgatgcaatgggttttggttttgttgaggtcggtacggtcactccgaaaccacagccgggaaatgataagccgcgtctgttccgtattgtcgaagcagaagggttaattaaccggatggggtttaataacctcggggtggataacctggttgagaatattaaacaggcccgtttcggcggtattctgggaattaatatcggtaaaaataaagatacaccggttgaacagggaaaagatgactatctgatttgtatggataaagtgtatacccacgccgggtatatcgctgttaacatctcctcaccgaataccccgggattacggacactgcaatacggcgatatgctggatgacctgctgtcagcaataaaaataaaacagcaggaactgcatcagaagcacggaaaatatgtgcctgtcgcggtaaaaattgccccggatttaacagcggaagaattaattcaggtcgctgacagcctggtacgccataatattgatggtgtgattgccaccaataccacattagaccgctcattagtgcagggattaaatcactgtaatgaaaccggcggattaagtggccgtccggtgcagagtaagagcaccgaaattatccgtttattatcgaaagagctgaacgggaaattaccaatcatcggtgtcggcggaatagattccctggttgccgcccgggaaaaaatggaagcgggtgcatctctgatccaaatctattcaggatttatctaccacgggcccaaattaattaaaaatattgtaaattgcctgtaattttcactattattcctgtcagggggtttatttttccccctgtttcttttatattttcagatgttgcctgaaaaattgtcactgacaggcaatgcacgttaaagcaaacaatcacttttaattattttatttaatgtgtagtgaaaatataaatcgctaatcaggtattagccgggaatgtgatcagatgaaaataaaacctgacgatcaatggcagtggtattacgatgatacgcatgagcgtattatgctggatcttgccaacggaatggtattccgctcccattttgcaccacgtctgctggcgccgtacgcacggtgtcacagcccgttttctgttgatgatgccgcgttattttttatctttgaagaacagattaaaaaattagatattccggcacagcagtgtgctgaattaacactgaatgcgttaattgcatcgcgttttttaaagccgcaaatgccgaagagctggtatttttcattgttctgcgcaatgacaaaaccggagcaggggcagctggttgaagtggtggcggataacaatcgtcagcgcagcaactttattgtggcggaagcaggggacagtgccagtttatgtctgctggttgatccggtacttgaattacacgatcggagcatgtgtttttgtgatccgataaagatcatgaatgatcgtttattaccaagaaccccggtaacacggagtttattaatgggcagagctgtctgaggctgtccggtaaacgatcataatcaggatcagataacgttatataacccccggcggatccttattattaataagtgatcaattcagccggaaatacccccggtagtttatctgccgggggtatttttttaccggttattcgtgacggccggttatccgtgacgaatagtaatattggttttcggaatacaactgcatgccagaatatcgccgttctcttttatcgccccggctttcagcggagtcacttcgccggagaccagcgtgactttgcagcaaccgcagacaccggcacggcaggaatacggaatattgacctgatggccttccagctgctccagtaagacgtgctgattattcaccgggtagagtttaccgttgaatgtcagttccagtgctgcttccggttgtgcgggcgcggcctgcaccttttccacttcctgttcctgatactgacgcggctcgcggggttccagtatggggacggtatcaccgacctgaatcacaccactgttgcgggcaatggcattcataccgaaatccacatcatcattatctgcggctttccggaaggtttgcagggtgtggaacggctccatttccgggtgtttaatccctttatccgtactgacagtggtgagaatacagcggctgcacggttttttcagatcaaacaccacatcaccgacctgaatggttttccagcggtcttccgcaaacggctctgcaccagtgacaataatattgccgcggaactgctcgattttaataccggcaccgcagcgacgctgcacctcacggaaagaggcttcattgaccaccagatagggataaccgtcggcaaacgacaccgcagtgtccgggaatttttttactctgcgggtggattgcgggctgagccagcgcagctgtaccgggatatcaaagaactgacacagccactgattgattttttccggtgcaagcagtgaggtgaaatggtttccccagacttcgcacggcaggtggtcagggcggaaatcctcaaacaggatcgtggcgccgctgccttccgggctgcgcaggtaaattccgttgctcagcagcaccggggtaaacaggaccatctgcgggtagcggcgggcggtgataaattttccggtctcatccgttatcataaaattgcggtcaaagcccagcccggtttccccggcatggctctgtgactggcggatgcccttcattgacttcacaggaaaggtgtataaacgggagagtgtgatgggtgttgtcgtcattgttatccgttcttttcgttattatcagtaataccacaatggcatcccggtttatccggaaaaaggtgaacgtcaattttatgatttaccgcccggatccgctataatgcgctccaattttttatttcaacggtaaaccatgatgaacgcgtattttgccagcaccgcccgcgggctcgaagaactcttaaaaaatgaattagcgacactgggcgctgaggatctcagtattacgcagggtggcgttcacttccgggcgcagccgcgtacgatgtacacgtgtctgatgtggagtcgtctggcatcccgtattttattaccgctgaatgagtttaatgtctatagcgacatggatctttatctcgcggtacagtccgttgactggccgtcggtgttctctgctgacaagacatttgccgtgcatttcaacgggactaacgatgagatccgtaacagccagtacggcgcactgaaagtcaaagatgctatcgtcgacagctttacccgcaaaaccggcacgcgcccggatgtggcaaaacagcagccggatatccgcatcaatgtctatctcaataaagaaaaagcctcgctggcaattgacctgagcggggattccctgcatatccgcggctaccgcgaactggccggtcaggcgccgctgaaggagaacctggcggcggcgattattctgcgttccggctggcagaaagagaccccgatggtggatccgatgtgcggctccggcaccctgctgattgaagcggcgatgattgcctctgattgtgcaccgggcctgaaccgccaccactggggttttgaagcctggggcggccatgataaagcggtctgggaatctgtccgcgcagaagcgcgcgaacgcgccaatgccggtctggtcagcgcaaccgcgcgcttcttcggctctgatactgataaacgtgtactggatatggcccgcgccaacgcccgccgcgccggggtggataaactgatcactttccagcagaaagatgccaccaaactggaaaacccgctgccggaaggcccgaaaggcaccattatttctaacccgccgtacggcgagcggctggagagcgaaccggcgctgattgccctgcacagtgtgttcggccgtgtagtgaaaacccgtttccccggctggcgtctgtcattattcagtgcttccccggaactcctcagcagcctgcagctgcgtgcagagcgtgaattcaaggcgaaaaacggtccgctggactgtgtgcagaaaaactatcagttaagtgacacaccaccggcaatggcgcaggatatcggggcggattttgccaaccgcctgcgcaagaacgaaaagaaattagcaaaatgggcgaagcaggaaggcgttgaatgttatcgcctttatgatgccgatctgcctgagtataatgtcgcggttgaccgctatgcggattatgtggtggttcaggaatatgcgccgccgaaaaccgtggatccgaacaaagcgcgtcagcgcctgtttgatgtgatcagcgcgacactggccgtgctggagttaccggcgcacaagctgatcctgaaaacccgtcagcgccagaaaggcaaacagcagtatgaaaaactggcggagaaacagaacagcttcctggtgaaagagtataacgcacagttatgggttaacctgactgattacctggacaccggtctgttccttgatcaccgtattgcccgcaaaatgctggggcagatgagcaaaggcaaagacttcctcaatctgtttgcctacaccggctcggcaacggttcacgccggtctcggcggcgcgcgcagcaccacgtctgtggatatgtcacgcacgtatctggagtgggcggaacgcaacctgcagagcaacggcctgagcggcagacagcatcgtttaattcaggcggattgcctgagctggctggcacagaccccggaacagtttgatctgatctttatcgatccgccgacgttctccaactccaaacggatggaggacacctttgatgtccagcgtgatcacatcgacctgatgaaacatctgaaacgtatgctgcgccgcggcggcaccctgatgttctccaacaacaaacgcggttttaaattagatcaggacggtatggatgctctggggctggttgctcaggagatcaccgccaaaacacagtcacaggattttgcccgtaaccgtcagatccataactgctggcttatccgccacgcaggcgaggaataacagaaattatgtcgttgattaatatggcgggcgcctggctcgcattcagtgatgctccgctgctggaaaatgcggagatgcatatcgaagaaaatgagcgtgtctgtctggtcggacgcaacggagcggggaaatccaccctgatgcgtgtgctgaccaaagagcagccgctggatgacggtacggttatctatgaacaggatctgattgttgcccgtctgcagcaggatccgccgcgtgatgtggaaggcaccgtgtttgactttgtcgccgaaggggtggcagagcaggcgcagcatatcaaggcattccatcagatctcaaaattagtggaaagtgacccgagtgataaaaatctgtcaaaaatggcggaactgcaggaaattttagacactcagaatttatggctgctcgacagccggatcgcggatgtgatcgcgcacctggaattaccggcggatgaaaaattatccgcactgtccggcggctggttgcgtaaagcggcactcggccgtgcactggtcagcgggccgaaagtgctgtttctggatgaaccgaccaaccacctggatatcgaaacgatccagtggctggaaagcttcctgaaaaacttcagcggcagcattgtctttatttcccatgaccgttcatttatccgcaatatggcgacacggattatcgatctggatcgcggaaaattagcctcctggccgggcagttatgatgattatctggtggccaaagaagaagcgctgcgtgtcgaagagatgcagaatgcggaatttgaccgcaaactggcgcaggaagaagtctggatccgccagggcatcaaagcccgccgcacccgtaatgaagggcgcgtccgtgccctgaaagccctgcgcagcgaacgtgcggaacgccgtgaggtgatgggcaaagcgaaaatgcaggtggaagaagcaacccgctccggcaaaatcgtctttgaaatcgatgatatcagctatggtattgatggtaaggatctggtcagccatttcagtgctcaggtaaaccggggggacaaaattgccctcgtcggcccgaacggctgcggtaaaaccacactgctgaaactgatgctcggtgatttacagccggatgacggtagtgtgcatatcggaaccaagctggaagtggcttacttcgaccagcaccgtgcagcgctggatccggataaaacggtgatggataacctggcggaaggcaaacaggaagtgctggttaacggcaaaccgcgccatgtgctcggctatttacaggaattcctgttccacccgaaacgggcgagaacgccggtgcgggccctgtccggcggggagcgtaaccgcctgctgctggcaagattgttcctgaaaccaagcaacctgctgatcctcgatgaaccgaccaacgaccttgatgtcgaaacactggaactgctggaagagctggtggataactatcagggcactgtcctgctggtcagccatgatcgtcagtttgttgataactgcgtgaccgaatgctggatttttgaaggcaacggcaccatcgggcgttatgtcggcggttactttgatgctcagcagcagcgggcacaggttcagtcgctgaaagcgccggcggagaaagcagtgaaaccggaagcggcggaagaaaaacgtaaagataacattaaaaaagcaaatacatctgcaaaattaagttataaattacagcgggaacttgaacaactgccgtcattgctggaatccctcgacgaggaaattcagcaactgcaaagtcaggtcagtgcgcctgaattctttaaccagccgcatgatgaaacagataaagtgctgaaactgctggcagagaaagagcatgcgctggaagaggcgtttgagcgctggcagacgctggaagcaatgcagagcgggaactgatcctgcctgtgattttggagaaataacgaaacagtgtgtgctcatcattcacatgattcagtcacggtgctgtgtccgcagtgcgacctggtggtggaaatccctgagctggaacggggaaccaaagctgagtgtccgcgctgccacacccacctggccgcccgctggcgtgaaccgcgccgccagccgctgatgtatgcactcagcggcctggtgatgtttgtgctcgccgggatgtttccgtttgtctcaatgaaagtggcgggtattgaaagcgaaatcacgctttatcagataccgtctgtgatgttcggggataactacggcgaactggcactgttctttatgggatttgtgctggcggtaccggccttctgcctgtttgccattaccttactgggcagcgggatccgcctgccgccttcgctggccattccggtcacgcggttgctgttccggctgcgtacctggtgtatggcggagatttttcttgccggtgtgctggtcagtttcgtaaaactgatggcgtacggggatatcgggctgggcgtgagttttctgccatattgtctgttctgtgtaatgcaggtgcgggcatttcagtgcctggataaacactgggtctggcagcggattgcgccgcgtccgccgctgccggtggcgctggaggcaggaaaaggcggtttgtgtcagggggtgcggctgtgcggtacctgtcaggcgattctgccggcagatatgcatgagtgtccgcgctgcagcagccggggtcatgcccggcggccgaacagcttacaactgaccatggcactgctgtttacctccgtgattttatatatcccggcaaacctgatgccgattatgatcaccgaatccctcggcagtgatttcggctcgaccattatggccggggtgattttgctgtggggggatggctcttatccggtggcgatggtgatttttatcgccagtatcatggtgccgagcctgaaaatgctggccatcggctggctgtgtctggatgccaaaggtcacggctggcgtgatcccggccggaggcactttatttatgaaatcgtggagtttgtcggacgctggtccatgattgatgtgtttgtgatagccgtactggcggcactggtgcggatggggcgtctgatgagcatctatccggatatcggtgtgattttatttgcgatggtggtcattctgacaatgattgccgccgaaatgttcgacccgcgcctgacgtgggatcggcttgaaaaaaaacgggcggagagtgctaaggagcctcaggttgaacgataaaactgatgatttgacagaagcgaaggtcagcaaactgaaaagctggtcaccggtctggataattcccatcgtcacggtactgattggtgcctggatccttatcagccactttcgcggacagggaccggaaatcaccctgatcacttataacgcggaaggggtcgaagccggtaaaaccaaaatcaaaagccgcagcgtggatgtcggtgtggttgaaagtgtcatgctggatcagagttacagccgcgtgatcatcaaggcccgcctgaatgcagaaatgaaagacgttctgcgcaaagataccgttttctgggtggtgaaaccgacggtcggccgtgaaggtgtctccgggctgggcacactgctgtcaggggcatatattcaggtgcagcctgccaataccggcggcgaacgccgtgaatttgaactgcttgattcaccgccgctggcgtctccggatgccaaagggatccgcgtgatattaaccagtcagcaggccggacaactgaacccgggtgatgctgtgctgttccgtggttaccgtgtcggttccgtggaaacggcggaatttaatcttgatgagcgcgaaatgcagtacgagctctttatcaacgcaccttatgacaaactggtgaccaccaacgcccgcttctggaaggacagcggcattgcctttgacatgtcctctcagggcgtgagtgtgcaggtcggttcgctctccacactgttcagcggcggcgtcagttttgatgtgccggatggctggcaaccgggtgaggaagtgaatcctaagaccctgtttaagctgtttgataaccagaagagcacgcaaaactcactctataccgaatataaaagttatctgctgttcttctccgactctgtgcgcggcctgtctccgggcgcaccggtggaattccgcggtatccgtctcggtacagtggcacaggttccgttctacgccaaagggctggggcagacatttgatcaggatttccgcatcccggtcctgatccatatcgagcccgagcgtttcgagaaagatgtaggtaaagatttcaaactggcacaggaactggaaaccgcattacagcaggggctgcgcgcctcactgaaatccggtaacttactgaccggcgcactgtatgttgatctcgatttctacccggatcagccggcgtggaaagcaccgatgaaaattgcggattatgacattctgccgaccaccagcggtggcctggttcagctgcagcaaaaagtactggcggcgctggataaaatcaacggcatgccgattgaaccgatgatgaaacaggcgacagagacactgcgtgccagcgaaaaaaccatcgctgaagcacagaaaacactgtctgagctgaatgtgttactcagcagcaaagagttcaaagcgctgccgaaagatatgcaggccacgctgcgtgaactgaaccgcagtatgcagggtatccagccggggtcaccggcgtacaacaaactggttgatgatatgcagcgtctggatcaggttctgcgtgaattacagccggtactgcgtaccctgaataacaagagcaatgctctggtctttgaagccgcgccgcaggcggatccgcaacctaagaaggcgaagaattaagatgaaaaaactgacaaaagcactggcattcctgggcgtttttgtactggcggggtgcagcagcaccccggtcaaacagtattatcagttaccggtggtggtggctgcggacagcagcagtgaacagacaagcttccgcagtaccggcagtgacaaccgccatccgcagttatggatccagcgtatcacgctcggggacgtgctggggaatgccgggattgtctatcagaccagtgatgtggaatacaacatcggcagcactaacttatgggccggtccgctggagcagcagttgctggaagtaatgacgacggaactcagtcaggcactgccggacagactggtttcggtgcagccgctggaaagtaaaccggataccctgactgtcactgtcaccggtttccacggccgttatgacggcaaagtgattgtggcgggcagctggatttacacccacggtgacgcggttatccgccacccgtttaatctggtactggaacaggcggaaaacggctatccggcgctggtacgtacgctgggggaaggctgggcgcaggtatcaaaatcggtggctgacgagctgcgtaagtaattgctggtttactctctgcaccggatgtgcagagagtaaattgtcatcaaaatgacaaatttgtgaaacacgccacattaatccgcttaatctgctgatcgctaaaacgattcttatttcgtctgaaacatccttctgaatacctttacggtcccctgaaaactaataatctgattacgctggtaaaataacagccctgtttttattgtgtatttttatgaaaagcggaactgacacaccctgaaccttctttacttgcaaactccggcccgaaagcgtatttctattatgggttgaataaaaatcaacctgttttcagcactgaataacatgagggaagtaacggcatgaaaagacaaaagcgtgatcgtttagccagagcattaaccaaaggttatcaggcgggtattttaggacgttctaaagagagttgcccgtatcttaaaattgacgaacgttctcattggttgggaggctggcgcgaggccatcgataaaagggcggtcattgcgtaacccggtttgaaggataaaaaacctccgctgtgcggaggttttttacggataacaccaataacaccacggcaggaaagattaaaacgcgctggtgtctttgaaaagacccactttcagatctgttgcagtgtaaatcagtttatcatcaacaaagacttcgccgtcaccgatgcccatgatcagcttgcggttgatcacacgcttgaggtggatgcggtaggtgacctttttcgaggtcggcagtacctggccggtaaatttcacttcacccacacccagtgcacggcctttcccttcgccgcccagccagccgagataaaaaccgactaactgccacatggcatccaggcccagacagcccggcatgaccggatcattgacgaaatggcaaccgaaaaaccacagctcaggtttgatatccagctcagcttcgatatagcctttatcaaaatgcccgccggtttcgctcattttaatgacgcgatccatcatcagcatgttgccggatggcagtggcggcccgtcttcaccaaagagttcgccccgtcctgaggcttcaagttcttgctttgtgtaggattcttgttttgcgaccataactcaatctttgccttgtttatcagataggctacacaatagcttacacttgtacgctgaacaagtccgatcagataaaaattgtgctatttccaccagcgggaaaaccacgaatttcttggtttatcctgattgttcgccaggaaaatccgatcctgaattatagctaacaggtgttctccggacggattaccttcctcttcatagtacggcatattcatcaggtgtgaggccgcctgagagacgtggcctgctgtccatatgtggaattcaccctgacgtaccgcttcaaccacatcatctgacagaaccaggtgacgctcgttggaggcagggataatcacaccctgtttgccggtcagccctctggcctgacacaggcggaagaagccttcgattttttcatttacgccgccgatggcctgcacaaacccgaactggtcaacagaaccggtcacggcaatctgctggtcaaccggctgccaggagagggcactgataagcgcgcacagctcagccagagaggcgctgtcaccatccacttcgccgtaggactgttcaaagaccacagaggtggagaacggaaacggctgctccagtttaagctccgcaatcaggtaagcctgcataatcatcatgcccttggcgtgaatgttgccgccaagctctgatttacgctcgacatcaacaaactcaccatcaccgatatgtgccacacaggtgatacgggagggctctccggtcgcttccgggtgccccggatactgcagaacggacagtccgttgatctggccgacagcgctgccctgggtctggatatacacctgaccctgaagaatctcatccagcccgcgatcggccagatagccgtggcgccagctgcggttgtctttgattttgcgcagcgcttctgcggtgatggtatccgccggcagcagggtggcggcatcgcgcagcagagtggtcagccatgtcaggtcgagcggcagggtctttttatcttcctgaaaacgcatcccctgacggagcagctcataccagccgtcagcactgagcggcggcagctgattttgcttcagcagcccgttgacaaactgacaccagacggtcagctgttctgtttcttccagctgacaatcaaattcatattcgccgtacagcgcttcttcgctcagttccggctcggagagcataaactcatccagactcaggcgatcgccgaccacgatgacccgcaggtcaagcggcatgctgtcaaccgggaacggcagcggatgctgttcggtgtgggccagccagtcaaaacgctgtgcgcagaccatctgctttaaacgcagccacatcagcggctgtgcgagcaggttgcgcagtgacatgatcagaaagccgccattaacctgatgaataataccgggctgcaactgcacatgctggtgatgggtatagacctggccgaacagctgctccggctctgtccagtcacagacagcaaacggctgcacagcactgaaatggccgttatccgacggtgtaaagacaaacctgtgattatcgaaatggtattcaccgcccatagtgcgtttttgccgggttttgacttccggcggcagtaattgcgctatggtattcaggtaacactcgctttcgtcacttttgaccagcataaaacggcgctttgctgccggatggctgaaaagtgacaggctttcctgtaaacgcggctgcacgatatcagcctgctgagcaggcagttcagaagcggtttgcaggatggtgtggtaactgttttcatcaggcagtaatgcctgccaggtcagctgtttaatattcactcggtattgtctgcttttgataatgtcggatttaatcgttgcggcaggatctggtgctctccgcagtgtgcggttatcagcaccgcctttgaatagtaacgaaaatagcgggacattgtagcgcgtaagcaggccggatagctatcctcgcggcgtttatttttacccgttctgagcggaaagaattgtgcagagaagcggttttttacagggaatattgctatgcttatggcagtgttaccctgtcactgagaaaaatcatgaaatatcagcaactagagaatcttgaatgtggctggaagtgggcatatctggtcaaaaaacaccgcgaaggtgaagaaattacccgttatacggaaaaaagccgggctgaggaagcggtggcgcagttactgaaactggagtcacatccggtaaaagtgacggcgtggatacaaaaacatatggcaccgggactggcgaaccggatgagtcagactatccgcgcacggcgcaagcggcattttaatgctgagcagcagcatacccgcaaaaaatcggttgatctggagtttctggtctggcagcggctgtcggcgttatcacagcggcgcggcagtaccttatcagacacgattgtgcagttgctggaagatgcggaacgcaaagaaaagtatgcgacgaagatgacatcgctgaaggaagatctgcaaaacctgctgggaacagacaaaaaataaaccccatccggagatggggtttatacaattcattgcatcatgcaaccgaattcagaacttactgagcagcctgctgagagacttgttcagttacgccctggatttcgatttcaacacgacggtctggtgccagacattcgatcagagcagcgcgctgtttgatattgtcacatttgttgccagtaacaggatcttctttaccgcggccttctgcacggatgctgccagctgggatgcctttagcgaccaggtaatctacaacgctctgtgcacgtttctgagacagtggcaggttgtagttctgggaaccgatgcggtcagtgtaaccgataaccaggacgttgccctgagttgggtcgattgacgccagttcgttgaacagctggttcagagcttcctgaccttcagctttcagagtagatttgttgaagttgaacagaacgtctgaacgcagggtgaaacgtttgttctcaacaactggtgcaacaaccggagctggttctgcaactggtgcagcaacttcatcctggccgaaacggtaagcaacaccaacactcagcatgccgttatcaggacgtgcgccaacggtttctttatcgccgatgttgttgatccactgatattctacgcgagctgcgatatcacgggtgattgcatactcagtacccagtgcgaatactggtgaaacaccggtgtcgttgtctttaacgcggtcaccgccgatagatgcggtcgcgtctgcacgccataccattgcacccagacgggtataaacgtctaagtcatccattacaggatagctcagtttggtggtcagctgaacgccctgtgctttgaatgcaccgttgtcgccgtcacctttgtaaggcatacgacctaaccagtcataacctaattcaaagcccatgtactggttgtgctgataaccagcatacagacctgcaccgagctgatctttatgggtaggaccggtgttttccagaacactaccagtgttctgatactgagaccaacctaatttaccaccggtataccaggtattgtcttttggagctgcctgcgcaacgcttgcgaaagctgccactgccactgctactgcgatagctgtctttttcattttacgcctcgttatcatccaaattggctctggcttaatagccttattatcgcctttggtttttaaaaatagtcagggattatgtgcgctatttagtaaatagctcccaacagggaattttaagcactaccttaacggtgtaaagtctacagcgaactataaaagttacaagcctgtcctgcggaattcgactaaaaaaatgtaaaaaactgtactgattcataaacatacaaaatagtcaatttctttggatatttggcttaacgcgttgaaatagtgtaattttattaattaagcagagcaaatgatacgggcatgtaaaaaagtctgagaatattcttaattttccttaatgataagggaaagagtgaatttgtaatgtattcagttgtcgtgtgacaggtgcactgtcatgatgccattcctgcggacgcataataaaaccgaggcagccaccctgttccgcagcgcgctgtaaccgggcattttcctgctcagtcagtaccggcagccagcccagaaccacactgtagttaccgctggcgagtgctttctccatagcggcaacactgttgattgccgggatgcgggacaactgcatgattttatcacccggcagctgattctgcgataaccaggtgcggttaagttttgcacccggagagagccataacagccagcgggactccccggcaagctgacgtaataaaggaagcagaatgtgggtcaggacgatatcattattgcgataaaccagttcgctgaccattccgttcagacggcgttcccccgcaagggcgggtgacacagatgccggtgtaacagggacgtattcccgggttgcctgctggcgcatagttaacctcacatagtgatactgtatatgtgtacagtataatccaattccgctcagatcaagtaaattttttccatacaactcgcaaaattcaggtttgccggatgcaaatacgaatttatcgttggcaatcggggaaacattccttattttgtggcgacagctgagctcagtcagggaatgacacaacgatacgtttaacctgctttcaaaggactgataatatgaaggattatttgaaattgtcagatgttcagtttgatcgtcttcaacacagcacacagccgttcggccggatccgcctgaaatcacagttcgggtgtatgggattatccattgaccgggtcactttcgcactgatagccaacagtcagctctggctgaaaagcacagaggccacccgcgagctgttctgccggctggaactgagtgaccggtttacttatcccaagcggatcctgccgatgcggattaactattaccgtgttccggacgcggtatggcagtgccctcagcagagtgagttccttttttaccagacctacctgcatgcacgggaacatgcacagtcacaacagcaactgccgtcgcggattaaagatctgccgaatgtggacagagctctggaacgccgcttatggcaggcggggatccgccgggtggatgacctctatttgctgggtgccaaagcgagctttctgaaggtcaaagcccggccgcagaatgagctgaaattactgtttgccatcgcgggagccattgagggatgccacagtgcggtattaccgaaagcactgcgggaggatcttatccactggcacggccggctgaactaaacggcgcaggtatcccggggaagtttttccccgggaagacatcagctgtccggtgtttcttccgccgcagtctgttttttgcggcggaaccgcccggcggaaggctgcagattatgctctttatcattgatctgccggataagcccggtaatgtccggtgtcaggctgagtaacaggcggatctgctccagcaccagctgctcggtactgttattgtcacaggtacatttatccagacgctgtgcgagcgcatctgaaatagcctgaatctgcaaatcttcccggtgccctttttgcagtgcggtctcgatatagcggatggcatcattcagcagacgcagaatagtgtcatccgtgagtttggtgcggtgagccccgagcgcggaaatataactgagcagcgtgtgattgagacagagcaggcggaacgcctcatcctgagatgtacggtaactgctcggctctgaggatatgttcgctaccacagaggcaaactccccgtcgctgatatgcgcatcacggcgggcaacccggtactccaggctgtcagttttaccgttgtaatactgttgcaggatttgttccagataacggccgtttgcctgcatggtgcggtcaatcaccagcggcaactggcggtatttccagtccggccagatataactgacagcaaaccaggcgagtccgcagccaatcagggtatcaataatacggtgaatggcgatatcaaacccttcacccagcaggttaaaactgaacagcaccagcagggtgataaaaatggtggcctgggcgtactgactggtgcggaacacaaagaacatcagcccggacagcaccatcagaataagctgtccctcataagacggcacaaaatacatgatcggcaggccgataaggatcccggcgagtgtccccactatacgcagcatcaggcggcgccgtgtggcactgtagttcggctggcagacaaacaggctggtcagcataatccagtaaccgcgggtcagatcaaaggtcaggataatggcgtaaccggcacacagcagcagcgacatccggatagcatggcggaacagggcggagcgcggtgtcaggttctgccggacccgtgcccagatatcacgcagtccctgtaagttttcgttggacagccgtgcatcttcctgcatcttttccgccggaagctgagtctgctctgcggtcagtcctttaagctgggaatcgacaccgcgcaggttggtcagcagatggcgcagagccatcacactgctgttaccgggcttttgctgctccagcagattgagggagttttccagataagaaaatgtccgttcaaaacgcgggttatggtgatatttgcggcgctgcaaaatggcctgtgcaacagcggcgcaggcatgtccctgcatggtcatcagccgctgaaagcgaaacataatatcgctgtaacgcagttcattgcttaaattctgatactggatatgagacgaactcgcccgctcgtgaatatcctgggcaacaaagtaataatgaagggcatggcgggtactgcgctggccgcgatcacctttcaggcgggaaaacagggtcatttttgcctgatgcatcgcgtccgtcagtgcgctgttcgccatcgccagttcaaagacggattgctgataatcttcttctatatccgggtcaaacaggtttgcttttgcctccagataattggagagctgcatataatagcgggcaagattatcctgcagcggacggacagggaaaaacaggtgcccggtcagggtcagcaggttataccagaccgcaccggtcagcagtaacagcggttgctgataccagtcatcaaacaggtttttacccagcatggtgtaaatcgcgatcagcagtgccccgaaagcaatggtggcgtaacgctgcccgagcgcacccagcaggataaacccgctggttgataccgcaagacctgccataaacaggaggtggtggtcatacagcagttcaatagccgcagacgcgacaaagaaagagatcagcgtgataaacagattacgcagacgcccggcgagccggtcatccaggtctgtcagtgcggcggccaccatcccgagtgtcagggcaatggtgactttcggcggcatgtgcagcagccacggcaccagtgtggtacctgtcagcgcaatcaggatgcggaaataataaagaaaatggctgttataaatataccggctgaagccgagaaacgctgcaagcacaataacctcaatgagtcagaaatacccttaacgggaatttggcagtaaactaattgtgtctttcctgtaatatggcaatggtatggcgctggcatacgttttaccacatctggttttatcacatattgatttcaatcttgtaacggtgcggaacacatggaattaaaatcaacacaaatggggcagacactggcccggcatccttacaaccgcgtgcggttactcaacgcaggtatcgaagtcagcggggcaaaacaccggtatgttattcctttcaatgagttaatcaatattcaatgtaaacgcggtatcgtctggggcgaactggaatttgaactgccggatgagcaggttgtgcgtctgcacggtacccagtggcaggaaactcaggaattttatcagtatcttaccgatatctggtcacgctggagtgaagagatgagcgtggtcagcgcgggtgtgctggataaacaggtcagtgaaattaagtcggtgattcaggccgaccgctggctgacacaaccggaaagtcagaaactccgtgacaacattctgcacgcctttgcggcactgccgctgccccgagcgcgcctggccggttttgataattgtgcgcagtcttatcagttttgtctggactggctcagccacaccgatgaaaaacgccgtcagcgcaaccacgaatggacacaacaatgccttgaaacgtatgcggatttcttttccaatgtggaatcctccccgctgaatacctcgcagagtgaggcggtggttaatggtgagccttccgtgctggtactggcgggagccggaagcggtaaaacatcggtactggtggcacgggccggctggctgctgcgccgtcagcaggcgctgccggagcagatcctgatgctggctttcgggcggcaggcagcggatgagatgaatgaacggatccgcacctgtctgcacacagaagatatccgcagtaaaacctttcatgccctcgcactgcatattatccgcgaggcatccaataaatcgccggttatcagtgcgctggaaagcgacaccgccgcccgtcatgaactgattaaatccgtctggcagactcagtgccgtgagaaaaaagcacaggcaaaaggctggcgcgaacttatcagcggcagtatgaactggctggtggatgagggggaatactgggaagatgaaaccctgtgccgccgcatggtgccgaggattgaccgctggctgagcctgatgcgcatgaacggcggcagtcagaaagtgatgattgagtctgcaccgccggatattgcaccggagttcaccaaacaaatcaaactgatggcaccgtttttaaaagcctggaaaagtgctctgaaagacgagggagcgacagacttctccgggcttatccatcaggcagtgaacctgattgaaaaagggcgctttatctcgccgtggaaagcggtgctggtggatgagttccaggatatctcaccgctgcgggcaaaactgatccacgccctgcgggcccagaacccgcagaccacactgtttgctgtcggtgatgactggcaggctatttaccgtttcagcggtgcggaactgactctgaccaccgatttcagcgcggtcttcggcgagggcggtcagtgcgcgctggataccacataccgctttaacagccgtatcggggagatcgccaacgaatttattcagcgtaacccgcagcagttaaccaaacccctgaacagcctgacaaaaggggataaaaaagccgttctgttactgccggacagtcagctggaagcattactgaataaaatgagcggttatgtgaccggagaagaaacagttttgatcctggcgcgttatcaccaccttaaaccggagattctgtcggtggcggcaacccgctggccgcatctcaatatccgttttatgaccatgcatgcctcgaaaggccagcaggcggattacgtcattattaccggactgacggatgaacgggacggcttcccggccgcggcacgggaatcggtgattgagcagggattactgccgcgggaagaggaatttatgcatgccgaggagcgccgcctgatgtatgtggcgctgacccgggcgaaaaaacaggtctggctgctgtatgacaaagactcaccgtcctgcttcgcggaagaactggcggacatgggcgtcagccgggtgaaaaagccctgaaatatgaaagaagcggcggtaaattatcaccgccgcagaaagccgttactgagtccgctcacttaaatagcggttgtaatccggaataacaatatccacatcgttatcgaaatccggcgagtgaataataaaatcagcggtggacatattggttgccaccgggatattccagacggtcgccaggcgcagcagcgctttcacatccgggtcatgaggcacagcattgagcggatcccagaaaaaaatcagcacatcaattttcccttccgcaatcatcgagcctatctgctgatctccgcccatcggcccgctcagcatgccggtgatttcaagcccggtttcgcggctgatcagtttgccggtggtgccggtggcgaacagttcatgggtttctaatttagccagattgcgtttaacccagtccagtaatttggttttatagtgatcatgagccacaagggcgatttttttatgcttggtcagtactcgggtggtcgattccataacgctctcttttccggcgaataaaatgttattcaataacataagcgaaaaaaagggttccgccaacaggtgattttcaattcagtatgctataactcagattgttgcgcaggatgataaaagaggcttctatgaatgacacatttctgaccggtattcttcggcaggtaaaaacaatcgccgtggcgggggcgagggataaacccgatcgccctgtttatcatgtgatggagtatctgctggggcagggataccgggtgattccggtgaatccgaaactggcgggaaaaaccctgatcgggcagctggtgtatgccacgcttgccgatattccggagccggtggacatggtggatgttttccgtaacgcggatgccgcgccgggtattgcgcaggaagcgattgccataaaagcgaaagtgctgtggctgcagcagggaattatcagcagtgaggcgaaagcgctggcggaaaacgccgggctgctgtttgttgaggatcgctgtccgaaaattgagatcccgcgtctggggctggaaaagtaagtaaaaataaagccccggcatgtgagtggcggggctcttcgtatgttaattgcgcaaccggggagactgtaactggttgcggatggactcagccagttcatccatagtgatgttatcggggtggtcttcatccatctcataggttatctgggcttctgccagatagctatggataggctcaccgttatcgtcttccatcacgacgtggtaccagggcgcagagcgcaggttcatattggatgcgatgtcgtcctcttccggctgatccagtgagtattcagcatcaatgtcgacaatcacgcccaggtagccaagcagcttatggcgaacttgttgtccgataccgaacttacttgaaatcatcataatcacctccgaagaaactttgctctgttactaatatggggggtactgatgacagattcaatcccttaacagattgttgtttcctatcactgcaatcagcaacagctgacaatttcaggttatcggggagtgggtaaaattacaaccggcggacagcgatacagattaaaatagtgacattttcggaaaaaggagcgacataatgaagatcggacgacattttgccgtatacggacgcgttcagggcgttggtttccgctatcaaacgttttactgggcaaaacgccataatgtgaccggttttgtccgcaatcgtcaggatggcagtgtggaaattgaagcgtatggcgatgaaagtgtgctggaggcgatgactgcatggctggaagcgggcgggccgccgggggcgaaagtgacagatattatcgcaaccccctgtgattacagggaagttgcggtattccgtgtccgtcacgaataaacggcagtcagatacatttcaccggtttcggcagaccggccagctttgttgcctgtttggccgggcctttcggaaacaggcggtacagataacggctgttcccgcgctcttcgccatacttctgtgtgatggcttttaccagcatgcggatagccggtgaggtattaaattccagataaaaatcccgcacaaagcggataacttcccagtgctgttctgtcagggtaatttcttcctgttcagccagcagcggcaccattgcttcctgccagtcctgcacattgagtaaatagccgtgggggtcagtggcgatttcacgcccttcaaacacaaacataatctgaacctgctgaaaatgagaatgaaaatgtagcaaaaatctgccgctaccccaagcatcagaagaaagaaagcggtgattatgatgataaaatcagctaacacattgagaaatgactaaatttccggcatttaaactatccgggactttacaaggcacaatgaggggactatagtgcacgtcattgcggaggggtggccgagcggcttaaggcagcggtcttgaaaaccgccgacgggaaaccgtccgagagttcgaatctctcctcctccgccatcttcactcctgataacatcccctgacgcttttcaattcctgataaatcattccatacagtaacgttatttgcccggctatcagctgaaacctcactaaactgcgcagtatgaattcgttaaagtcaggtataaccggggcagggcgtgatattatgatggtgccacttcgctttgtctgattcgttccgtattgggtcaccggagttttatgtttaacttttaacaatgttaaaggtttaaaatatattttagttcttttattttttctttttgcggcgactgatgaatatctgcacagtagcttttttcgtattcatcgattaaattttccacagagagtcttttgttcggaacatccatttttaaatcatctcttgcttcctgctgtaaacgcatactatcgtaaccgctcattttaggtatttcatcaccaaaaacagatgttactccattcatgcgaaaattaaccttcgcttgttgatctccgatttcatcaacggcaattctgcacttcatatattttactactttcgtttcctgagtatcgcagccttgtaataaaatacatccgattgtaacgataataataccgaaaattttcatccctcagatacccttaatttaatggtaataaagtgtgattttctcacaaaaaattctccatgataaataaaaggtttctctgttccctgaacctaaacagttttctcagataattttcttcaggcgaactgtccactccggccggaagctgatgtcgccgcattcagcgtcatgctgctgattagcacaatatttttccggcaatatttcccttcccgtttcgtcaaaaatgtcgattatcattgtctgacacatcaaaaaaccgatccttcattgattataaagccattttttactggcatgtaatatgcatgggtgacatttcttttcttactcttttactccctggtcaggggaaaggacgtcaaatgaataaagtcatatctgtatgcccgtattgtggcgccggttgtaaactgaatctttgtgttgaaaacggaaaaataatcaaagcagaaggtgctgatggtgttaccaaccaggggcagctgtgtctgaaagggttatatggctgggattttcttaatgataacaagttactgacagccagaataaatcagccgatgatccgcagagaaaaaggcgcaccgtttgaagttgtcagctggcgggaggcgattaattataccgctcaccggctgaaacagatcaaagaaaagtacggtgcaaaatccattatgtgtacgggctcctcacgcggaaccggcaatgaaaccaactttgtgatgcagaaatttgcccgtgcagtattgggtaacaacaatgtggattgctgtgcccgtgtgtgtcatggtccgtcagtggccggattgcaggtgacattgggtaacggggcaatgagcaattccatcgcggatattgaacactccggttgcctgctggtattcgggtataactgtgcggattctcatcctattgtcgcccgccgggtgataaaagcaaaagagaacggtgcggaaattattgtctgcgacccgagaaaaatagaaacagctaaaattgccacacaataccttcctctgcggaacggtaccaacatggcgctggttaatgcgttcgcctataccttaattgatgaaaatctgtatgacaaaaattatgtcagccggtttacagagggatttgaggagtacaaaaaagccgttcaggattacagccctgaagtggttcaggatattaccggcattccggcctcacaaatccgtcaggcgatgagaacctatgcgcgtgcaaaaaccgcaaccattatgtgggggatgggggtgacacaattcgggcaggcggtggatgtcgtcaaaggcctttccggactggcgttattaaccggcaatctgggaaaacccggtgtgggggttgctccggtcagagggcagaataatgttcagggtgcctgtgatatgggcgtactgcctaatatgttccccggctatcagaatgtgacagatgaaaatgtcagacgtaaatttgcgcaggcatgggggatcccgtatgaatcccttgaccctgaggcgggctaccgtattacggaagtcccgcatctggccattgagggaaaggtaaaagcctattacatcatgggggaggatccgctgcagacagaagcggatttacaactcgtccgcaatgggtttgatgccctggaatttgtggtggtgcaggatatctttatgaccaaaacagcggagcaggccgatgttattctgccgtcaaccagctggggtgagcacggcggtatctttacctgcgcggacaggggctttcagcggtttgagaaagccattgaaccacagggaaatgtaaaacgggactgggaaattatcagtctgctggcgacagagatgggatacccgatgtcttatactgacaacaaagagatttgggatgaactcagagaactgtgtccgctgttttacggtgtcacctatgaaaaactggaagggctggcacatattcagtggccgtgcccgtcagaagatcatccggggacaccatacctctatcagaataacgtctttgataccccgtcaggcaaagggctgctgtttgccgcaccgtggcggaagccggcggaactgccggatgatgaatatccgctgatcctttccactgtccgtgaggtcgggcattattcatgccgttctatgaccggtaactgtaaggcgctggcatccctggctgacgaaccgggatatgtgcagatgcatccggaaaccgcaggaaagctgggaattaaagaccaggatattgtgtgggtggagtcacgcagagggaaagtgatgtcccggtgcagtatcaatgaaacgattaataaaccagcagtttatatgacatatcagtggtggattggtgcctgtaatgagctgacacaggataatctggatccggtatccaaaacaccggaaactaaatactgtgcggcgagagtgatcagaattgatgatcagaaagaggccgaagctctcgtcaaagaaaagtatgctgtcatgcggaaccggttaatcggtttagttgaaacagcagaaagccaaattcaataaacggaatacaattaataccatgtgaccacagggtgttttacagcactctgtggttttttataccgcatcattactgaatgaaacacaaaaagtcggcagccgccggatgcagatgagtccccggtgattactggtgtcatcatcagccggaaaatgtccccctgccggttatctccgtccgcacataaaaacaatatttccgttttctgtgatttttctcaaataatcaaaaagatatttcgctaagatagcgctcttaaaggagcgatgtctatgataagtttatctcatctatccggtttattcttaggggtattactgggttttgttatgcagcgcggccgcttttgtttagccggtggtttgcgcgatctctatctcttccgcgacagcagaatgctgattgctattctgattgtcatctctgtccagagtatcggactcttcattttttcttatttcggtattgcaaaaatccccggaggcacatttccctggctggcaacactggctggcggattactttttggcatggggatggcatttgccgggtcctgctcaaccggtgcttattaccgggctgcggaaggattggcaggcagcattacagccgtcggcggttttattattgccagctggtttatccgtcagtctgccgtaaaacaggtcttttctccggttaccacaccgaagctggattccccgactatcacacaatcactgaatatcccgccgtatatcgcgattattgttttggtgctgctgacggtttttctggtgaatcgtcacctgaataaatacaaatctgttcacatccccaaaatgaaagcccggaaaaccggggtcgctcacctgctgtttgaagcccgctggcatccgtttgtttctgccctgattattggtgtcattgctctgcttgcctggccttcaagcctggcggacggacgtgtcggggggttagggatcagcggcccgagcgcacaattattttcactggtgacggccggcgacctgaaattctttaactgggcgggttatctgctgatcgggatttttgccggggcgtttatcgccgcaaaaggcagccgggaatttcgtttccgcaacccgggttttcccgtgatgataaaaagcctgaccggcggattactcatgggcatcggcagcggcctggcaggcggctgtatgctgggaaataccttagttaatacggcctggttctcctggcagggctgggcgtttattccctgcattatcgccggcagctggattgtcagttattttacgatcatacgtcctcagaaaataaagtaataaggtgaaactatgaatacgctggaattagatacccgcgggcacctgtgcccctttccgttaattgaagcaaaaaaagccattgaaacattagcgaccggtgatgtactggtcatcaaatacgattgcgctcaggcaacggaaaatattccgcgctgggcggcagaagccggccatgaagttactgattttgaacaaatcggtgatgcgcaatggcggatggaaattaaaaaagggtaacgaaatgatggcggtctgtatgcttctgcgtaccattttgttgatatcaccgtaattgatacatctttgtgtatagtaatgcgtacaggatgacgatcctgattaagtcatttattgaaagcatcaatacaccaattccggataaatctgacagctctgaaatgtcatttaatgaatgtaaatcaatagcgaagacagtcatctctgatttcagtaacgcttacccgacagtgattgacgttgatagcagcacgcattttaaagtaagaatcgggtcaataaatgaggtgtttaccccggagtgtgttaatgatgagaagcgggtttacagggctaaatacaaacccaaaaacgtgctttcttcatcatgacctctgctgttttcagggcaggaaatctgattatagttgttccgtttcagaggacgtggacaacttcctgtcagattgattatttaaaaaacagcataatattgtgcttttatccatcaatgttgtacacgacagaatgaaaaatccgacaggtttgtataatttttcggaatgatatttttattgttataattcattgtattacgagatatttgcatttggttaaatatttatttttctgatcataaggggaatggttgttttctctattctttacagcgtattagcgagatatgttaaaaaacatggttgtttgtcatttttttgatctgacatatttcactgcatcaaccggtcattgttgttatttcaggtcatatatcctgtttttgcaacgattttaacttaagtaacagatcctgtcagatacaacccttcctccggtctttacagaccagtaagtaaaatttatgattcaatttattatcaccatgcgcactggctgatgacgaagtcactcgtccggtaacgatttgttacctgttaataaataaggaattttatcatgccaactccatgctatatctccatcgaaggtaaaactcagggcaatatc

SEQ ID NO: 81 - DNA, 415 bp, unknown
  Altogen 322075 strain
cctttaccaccagcgtggtcggggcgatcatggatggtatcatgctgatcggcgtgtttatcatgatgatcctctacggcggccatctcacctggattgtgctcgggtttaccgccgtatatatcgggctgcggctggagccctaccgttattaccgccagctgtcgggggagtcgctgatcaaagaggcgcgcgccgggtcgtattttatggaatccctctacggcatcaccacggtgaaaacccagggcatgagcgaccgccggggtaatcactggctgaatctgaaagtcgattccattaataccggcattcgtctgactaagatgaacctgatgttcggcggggtgaatacctttatcatggcctgtgaccagattgccattctgtggatcggcgcgggtctggtgatcga

SEQ ID NO: 82 - DNA, 19203 bp, unknown
  Altogen 322075 strain
tactgtaagcctctgcagggttacccgctggacggtgtgatccattataagtgtgaagcgctatgaaccggaaagaagcggtaattgccgcgctgtttatttttgccgcctggtgggtatatgacacctaccgggataaccaacagctgaaagtgagtaacacagtactctcaggccagttatcagcacagcaggcgataaacaccaccacgcttgcagctgttgccatcagacaccgcgtggcactcgacaacatcaaagccaaacaggttgaggacacagagcatgccaacgttaagacggttatcaaaactgttttcaaagtcagtgaatgcgctgctgtttctgttcccgctgatgctgtcagtgagttgcgcagatacgcgaccggaattaatacccgcaccggtgataccgattccgccacaactgaccgctgattgtgagcaggtagagataccggatgatctgacgttcggtggcgcagttgagctgctggccgatgccatgaaatacattgccaactgcaatcatgataagaaggcaatacgggagatagaagcggagaggcaaaaaaaagccccagaataaaggggcgcatatggaagattcaggaaatagttattgttattttcgtactgagtataccctcagtacctccgtaatttcaatgtgattaaaaaattaaaaaatcattttaaaacaaggatgtaatgcaattgaagaagaatgtttattctaactgcgatgttcaatatgcaggcaacctcgcgtactaatcaacaacgcttgactataaggatttcgaggctcgctgtattcaggctttcggcaaatcagggatgcgaatgatttatcctgctgaccaaccacataactatgcagtaacactccaatagactgcccagtggtattttttatgtcctatgctcagatatgagcaacgaaccattttatcaaactctgcaaacggtcgtttacgggtggtgttaatagagacttatgaaagtctgccgccatcatgtagtatcggggtacatgccacaatggtgagaaattgtatgattctgcataatgtgcttaaaactatatacatagacaataacgacaatgattttttgaaatatgaaatcatgggggagcacggtggcgatgtaacaatagcgatcgtatcagcggaaattaagtcagtagttggcggaatagactgttatctgtgggctaaagtcggagagctaacatttgagtaccttgacccgccaaagagaggatcattccagcagactgtagcaatggaatctccgccggggagaagtatcagcaccgtaatgcgggaatgcaaaaaacacagagctacctggcaaagaccgtaacaaatacataacccgctccggcgggttttttattggggaaatctatgccaccacgtataccacgcgcctgtcgcaagcgaggctgcgcaaagacaaccacagaccgcagcggatactgcgaagaacaccgcaatacagggtgggagaaccatcagcagggcaagagtcgacacgaacgtggctacggcaccaaatgggacaggctgcggctggtggttctgagccgggataagcatttgtgccagcagtgcctgcgtgaaggacgggtaaccgaggcgaagacagtcgaccacatcactcccaaagcacatgggggaaccgatgcggaaagcaatctgcaaagcctgtgctggccctgtcactaccgcaagacggcaacagaccgcaatcgcggctgactgctcatgatgtatgggggagggggaggtcaaatccctgccgccccacggccagaggaccgccgccttgctttttttcacatcgccgcaggttagaaaacttttttccgggttctccggaggggtattaacaggagaaaacgattatgccgggaccaccgaaaaccccgtcacacctgcgtttggtcagggggaacccatcaaaacgtccgattaataaaaaagaaccaaaaccgccgtcaggggtacccccaacaccgaagcattttaccaagcaggggaaatactggtttaagcggataggtgaagaactcaatgcgatgggtgtcatgagttcaatggatgccaaagcactggagctgctgatcgaggcgtacaccgaataccggcaacattgcgataccctggacaaagaaggttacacctacacaacacagagtgatggcggaccactgataaaagcacacccggtggcggcaatgaaagctgatgcatggaaacggatccgcgcgatgctctccgagttcggtatgaccccggcagcccgccagaaggtaaccattaacacaccagccgaagaagaccctttcgaggcatttctgaaacaaagaaaatgatgaatggcaaccgtagcagacgggatccggtacgccgagcaggtggttgccggagaaatagttacgggcgaactgatacgcctggcatgtcagcggtttcttgatgatctggaatacggccctgagcgcggtatttatttcatggaggaacgcgcccagcatattctggatttttaccagttcgtcccgcatgtcaaaggggcgctggcaggtaagccgatagagctgatgccgtggcatacctttattctgattaatatttttggttttgtgatcccgctggttgatgaactcaccggcgaggctcagtacgacgatgacggggatccggtgctggttcgccggttccggacggcctataacgaagttgcacgtaaaaacgctaaatccaccctgtcatccggtatcggtctgtacatgaccggcgctgacggtgagggtggcgccgaggtttactcggcggccaccacccgtgaccaggcgcgtattgtgtttgaagatgcaaaaaacatggtcaaaaaggccaagagctcactcggccgcctgtttgaatttaataagctggcgatttaccaggagcggtctgcatccaagtttgagccgctgtccagtgacgcaaataacctcgacggcctgaatattcactgcggcattgtggacgaacttcatgcccacaaaacccgtgatgtgtgggatgtgctggaaaccgcgaccggtgcccgtcttcaatccctgctgtttgcgatcactacagcgggatttaaccgcgagggcatctgctacgaactgcgggattacgccatcaaggtactgcggggcgtggtggaggatgacacctttttcgcggcaatttacacaccggatgaggatgatgacccgttcgatgaaagcatctggataaaagccaatccggggctgggtgtctgtaagcgttttgacgatatgcgccgcctggcgaaaaaggcaaaagagcagattgcggcccggcctaatttcctgaccaagcacctcaatatgtgggtgaatgccgaatccgcctggatggataccggtaagtgggacagctgccctgaaaatgcgccggatgatgagctgaaaaattacccggtctgggttggtgtggatctgtcaaacaaaatcgatgtgaccgcagccgttaaagtgtatgaggatccgcgcggacaactgcatatgaagtgcaaattctggctgccggaggacagagtagtgactgcaccgaagcatatcgctgacctgtaccggaaatggggagctgccggttatcttgaactgacggacggtgaggttgtcgatcacgacatcatcaaagccgacattctggcatggtgcgaaggtgaggatttacgtgaactcggttttgacccgtggagtgccgttcagttctcccgccgcctggcggaagaaggcattccgctggtggaggtggcgcagacggtgaaaaacctgtctgaatcgatgaaaaccgttcaggccgatgtatattccggcaaatttcaccatgaccacaacccggtaatgtcttggatgatgtctaacgtgacggtaaaaccggacagaaatgacaacattttcccgaacaaatcgacaccggaaaacaaaattgacgggccgtttgccctgtttacagccaaatcacgccagatggtgaacggtggcggtggttctgacttcctttcctctctggatcctgacgaagaaattctatttctatgaaaaacatacttcttgatctcaccgccctgacaggtttcggcgcggtgctggcaggctgttacctgaaatacggtctgccggattctctggtgattggcgggtcagcaatggttatctattcactggctgtggccatgagggggaaacgtgcttcttgatgcattattccgcgatacaccgaccagtattgagaatccggcggtacccatcagtgcaggttctgttgatacagaggggctgttcaaagcagatgtctatgtcagcccggaaacctcgatgaaactggccgctgtatatgcctgtatttatgttctttcttcctcaatagcacagatgccgctgcatgtgatgcgcaaaaccggcgataaggttgagactgcccgcgatcatcctgtgtttcaccttgttcacgatgagccgaacgaatggcagaccagttataaatggcgggaaaccaaagagcgccacattctcggctggggaaacggctacacgcaggtgatccgtaacagtcgcggtgaggtgaccagtctggaagcctgtatgccgtgggaaaccgcactgcttaacacaggtggccggtatacctacggtgtttataacgaacaggggaattttgctgtcagtccggatgacatgatccacatccgggcgctgggtaataaccagcggatggggctcagtccgatagtgcagcatgcggaaaccattggcatggggatgtccggtcagaaatacaccagttctttcttcggcggtaatgcccgtccggccggtattgtttcggttaagggggagctgcaggaaaaaggctgggaccgccttaagtcaatgtggcagaaagcgtctgcagcgctgcgcagtcaggaaaacaaaaccatgctgttgcctgctgacctggattacaaagccctgaccgtttccccggtggatgctcagttgatcgatatgctgaagctgaaccgctccatgattgccgggatttttaacgtaccggcacacatgatcaatgatctggaaaaggcgacattctccaacatttccgaacaatccattcagtttgtccggtatacggtcatgccttgggtggtgaactgggaacaggagcttaacaggcggttgttcacccggcaggagcgctgcgccggattttatgtccggtttaatctggccggattactgcgcggaaccccgagagagcgggctgaattctatcattacgccattactgacggctggatgagccggaatgagacacgggcatttgaggatatgaacccggttgacggactggatgaaatgctggtcagcgttaatgccgcacaaccggacggcagtaaatcagaaggtggtgaaaaagatgagcagtaatgaaagagaaacccgcagctacagcggtgagatccgggccgccccgggggaagaggataaaccggcccacattatcggtctggcttcggtgtttaactccctgtccgagccgatgtggggattccgcgaaattatcaaacccggcgcatttgacgatgtgctgaatgatgatgtacgggcgctgttcaatcatgaccgcaattatatcctcggccggtctgcttccggaacgttatcactgagtatcagcgaacagggactggcctacgatattacggtgccggatacacaaactatccgggaccttgtggttgctccgatgttacgcggggatgtcagtcagagttcgttcgcgttcagcgtggcggtgaacggcgatgactggtatcaggatgatgacggcatggttgtccgtgaaattcaccggatctcccgtctctatgatgtcagtccggtgacttatccggcctatctggccgcaaattcaaccgtgcggtcaatggaggcgtggaaagaagcacgcgacagcggcggtatagccaaagctgtcaatgaaaaactggcgcgtgagcgtcttctcactttaatgaatgtataaggcaattctatgaaacttcatgaattaaaacagaaacgtaataccatcgccaccgaaatgcgtgcaatccatgaaaaagtcggtgacggtgttatgaccgaagaacagcgcgcggagtggaataaggccaaaacagagtttgatcgtctgaatgagcagatcacccgtgaagaggaactgcgtgcggcagatcaggcttttgtggatgatcaggagccggaacagcgcggaaaacagaacggtaatccggaaagtgaagccgcagagcgccgcgcagcggcatttgaccgctttctccgccatggtttcggtgagctgacagcagaagaacgtcaggccgtgagggaattacgggctcagggaacatccccggatgagaaagggggctataccgtcccggttaagatgctgaacaaagttgttgagcagatgaaagcctacggcgggattgtctcggtttctcatgttctgccgacggcggacgggcaggatattacctggtcaacatcggacggcacagcggaggaaggtgaactgctgggggaaaacaccgctgccagtgaacaggatgtggaattcggcaccgccattctcggtgccaaaaaattgtcttccaaaattatccgtgtatcaaatgagttgctgcaggacagcgggatcaatattgaatcctaccttgccgcccgtatcgcgcagcgtatcggccgtggtgaggctaaatacctggtgaaaggtaccggtgccggcacgccggtacagccgaaaggcctggatgtttccgtgacaggaacggtaaacgcgaaaacagccgcattcagctggaaagacatcaacgcgctgaaacacgccattgatccggcgtaccgcaacagccctaagttcaggctggcctttaatgacagcaccctgaaagtgctcacggaaatggaggatggtaacaagcgtccgttgtggctgccggaaatcaccggtgttgctcccgcgacaattctgggtatgccgtatgtgattgatcaggcggttgacagtatggaagccggtaaaaaatttatcttctgtggtgattttgaccgttttattgtccgccgtgtcacttatatgacgctgaaacgtctggtcgagcgttatgctgaatttgaccagaccgcgtttctggcgtttcaccgctttgactgttgtctggaagatacctcagcgattaaggcgctggtggcaaaagctgcctgatagtcataccgttgcaatcctgtgcgccgcttaactgcggtttttttgtgcctgcggtctgaagtggccgcaggcatgggggaaatatgccgttaccgacactcgaaaaactgagaatgcagtgccgtattgatgaggataatgaccttgaggatgagttgcttctgacttacctgggagcggccgtgaagcgggctgaaaattatattaaccgtcatctttatgacacagaggttccggcatcagatccggacggattaccggttacggatgatatagaactggccctgctggtctgcgttggttacttgtatgaatcacgggaaaatgcggcaataccggcgggcttctttctgctgcttgaaccgtacaggttcatcaatttatagggagcgcactgtgcaggccggaagattaaggcatcgcgtcacatttcagcgtgctgaacgggttatcttaccgtccggccagcgtgaaaaccaatggctgcccgttgccgtaacctgggcggaagtcagatccgtcagcggcagggaactgctgaccgccggagcggaaatgtcagaaataacggtccgcgtatggatgcggtaccggccggatattcatcctgcatgccggatggtatatcgcggtcaggtctacgatattcaggctgtgatcccggatgtgaaatttacccggctggaactgctgtgtaaacagggggtgaaagatggctgatatggggctggatttgtccggttttgctgaactgtcccgcgatctggaatcactcagccgggctgaaaatacccgtgtgctgcgggaagcgacgaaagccgcagcggatatgctgcgggatgaggtccggcggagcgctcctgtcaggaccggaaaactggcgcgtaatatcgttaccggcggtcagcggagccgttataaaggtgaggttgtctccggtgtgtacatccggggaaccaatgccgccggaaccaacagcgacaatacactgaaagcggatgatccgcgtaatgtgttttactggcgttttctggaaaacggcacatccaaaatggcaccacaaccgtttatccgtccggcatttgacggtaaagcggatgaggcagcggatctggcgctgagcaaactcagtcaggctatcgataaggtgctgagcggatgaaagaatctgatttgttttctttgcttgacccggtgctgccgggcagggtttttccatatgtggctccgcaggatgaacccaaaattcagccgccgtggtgtgttttttcactttatgataccggcggagatgtgctgtgcggtcgtgctgagacaatgaccaatatccagattgatgtgtatgcaaaaaccatcgatgaagcccgtcggatccgtgaactgtctgttgctgctgtttctccgctttcaccggcagagtttacagaaaagcagggctatgaatcggatacctcgcttttccgggccacgctggagtgtcaggtctggcaataacttaatcttgaacaacaagctgctgcggcagctttttttatgcttacaggaaaataatcatgccgagcaaatatgaaaaaacgcagggcacgaaaatcagtatttcaaagctgcctgcaacagaagtgaaccccgcatccgcagaatttctgccgctggcctgtgcggccaaagagatcagttataccggtgggcagaagtcggatattgatgtcacaaccctgtgctcaacggagcaggaaatgaccaacgggctggcctctccgggggaaatcacgatctccggtaactggtcaccggatgaaggtcaggatgttctgcgtactgcctatgacaaagacactattcatgcgttcaaagtggagtttccgtcaggtaatggttatgccttcctggcagaagtccgtcagaacagctggagtgcggcaaccagcgggctggtcaccgcgtctttcacgctgcgcatgaaaggtaagcctgttccgctgaaaaacggggcggtaactgagccgggaaagagggagtaagccgtggcgaatccgaaactgtcattaaaagaactggcactcagtccaaaaaacgccttccgttcaaagatggtgaaggtacctgaatggaacggagtcaccgttattcttcgggaaccgtcttcggcagcctggctcagatggcgtgagctgatgaataccggcgcagacggtgatgaaaaattgtcagaggcagaacaggcgcagcgcaatctgcgtgcagatgtggtgatgttttctgatgtgctgctggatgaagataaagagcgggtgttcagtgatgacgacacggaaacgatgatggctgtttacgggccggttcatgcccgcttactgaaacaggcgcttgacctgatgaccacgccggatgaagcggaaaaaaagtagcgcagcccgggatgttttttctgatgacacttgcgctccggatggggcgcacagtggatgaactgaccaggacgatgagcgccagcgaaatgaccttatggatggcttttgaccgtctcagtccgatcggtgacatccgcagtgacatacagacggcccatattgtctcctcactgtacggcgcacagggcggcaaactcagcctgaatgatgcgatgctgaaatggggcgctcaggatgagagaccgcccggtgacagtctggaagagtttctcggatctatttctgaacattgattttattttttgaacgggggagtaatggcgaagcttcgtgagcttattattaaaatatcggcaaattcttcctcgtttcagtctgaaatagcgcgcgcttcacggatgggggagaactattaccggaccctggagcagggtgggcgcaaagcagcatcggcatcacgcgaaacgaaacgggcaatcagtgaactgaataatgaactgtcatcaataaaatccacggtaaccggtgtcatgggggccatggccggtgcttttgccacgcagcagcttatcagttatgccgatacatggagtcagttaagcggccgtctgaaactggcctctgtgtctgcggaggatttcagccgtgctcagcaggaactgatgtcactgagccagcgtaccggcacgtcactggcggcaaataccaacctgtatgcccgtattgcacagtcgatgcgtgatgtgggttatgcctcgggggatgtggcaaaagtcacggaaaccatcgcaacctcactgaagctgtccggtgcaagcactgaagaagccagctctgttattactcaactcagtcaggcactggcttccggtgttctgcgcggtgaagaatttaacgcggtgatggagaacggcggacggctggcaaaactgctggctgacgggatggggaccaccatcggcgggctgcgcgatatggcacagagcgggcaactgactaccgataaaatcgttccgatcctgacaaatacggagcaactcagaaaagaatttgagcagttaccacagaccgtcagtatggcttcgcaaaaggtagaaaacgcctttatggcgtgggtaggcggggctaatgaggcatcgggcgcaaccagcacactgaccggtgcactgaatggtattgcaggaaatatagacaccatcgccactgttgcaggggcactggtcggggttggccttgcacggtatttcggcgggctgaccgccagtgtgaccaaagcaaccatcggggtggccggtgccgcaaaaggtgagatcgctcttgcgcaggcccagctgcgcgggacacaaattgcggttgccagagcgcgtgcggcagaataccgggcacagcaggcactcaccgcatcacgtggcacggatgcacaggctgtcgcagaaaagcggctggctgccgctcaggcctccgttgcccgtaacgtgaatgcccgcaatattgcccagaataacctgaacaatatcacctctgtcggcacccgtctcctgggcggggcgctcggccttatcggcgggatacccggactggtgatgctgggggccggtgcctggtacacgatgtaccagaagcaggagcaggcgagacaatcggcgcttgaatatgccggagctatcgatcaggttctggcaaatctgaacaaaatgacgctgccggaaacgtcagataatgcggggaaaaccaaagaagccctggctgcacaaaataaactggttgatgagcagcgtcagaaagtcgagggattaaaatcagagatagccgggtatcagcagatgctggcctcaccgggaccaagtctcaacggctatctgattaatcatctgatcagtcaggaggatgcggttaaatccctggcggctgcgcaggatgaactttctgttgaacagagcaggctcaatgagctgagcaaaaaatcggaagagattcagtcagcactgaaggcggtcgaaagtcagcgtgattttcttattcgtcagcagtctgctgcccagaataatatgcgtcattcattactgatggtgaatgcggagcatagcgaatttaaccggataatgtctgccggaaatcagatcctgactaaccgtctggctctggttaacagcccgatgcgtatctcggcagcgcctctcagcgaaaaacagcaggatttcattcagaaatcagagcgtgacaaagaactgtccgcactgacaggggaagcccgtgttatccggcaggccgagtttgccgcagatgatatcggtctgctgaataaacccgaatttgccgataaccggcagaaatacattgataatcaggtggcagcctaccggaatcaggaaaagctgagtaaggaactgaaagcgggtaaaagcgcccagagtgctttcaataaagagcagaaagaagcggaacgtcaggcggagcagtatgcccgcaaaatggcggatctgagtgtggccacggaggttcagaaagtcagggccacgcagggagagaaggccgcagagctgtatgcggctgcgcatgaggccggtaccaaatggacggatgagcagcgaaaagcgatccgcgcatcctcggttgccctggcggagtggacacaaaaggccgatgaggcggtcagaaagcagcgtgaaatggatgatgcgctgaaagcgatgcgtgacggtgcccggaaattcagtgacgaagcggagcaaattgataaaacccggggaatgggcggaaaacggcgcagtctttacgatgagcgtcagcagattgatcgtgtttatgccaaatctgatcagggaaaaagtgcgaccgaagcttataaccgggagattgacgcactcaacctgaaatatcagaaaataaaggaggttcagtctgactggaccagcggggttacccgggggatggaagactgggttgctgaggccggagactatgcggagcaaaccgcatcagcagtgcagagcgccatgggcggtatggtgaataacatcactgacatgctgaacggaaataaagccagctggcgcgactggtcaatagatgtccttaaatccatccagaaaatactggtcaacgctgccatcgtgaacagcctgaaatccatgtcagatgccggtggctggattggtgctgtcggtaacttcctgggaggtgccgcggcaaatgccaaaggcggggtatatgattctcctggcctgagtgcgtacagcaatcagatagtcagcaccccgacttattttgcgtttgccaaaggtgccgggctgatgggggaggccggaccggaagcgattatgccgttaacacgggcggcggatggctctctgggtgtccgggcgctcggcggaaatcagaacagcggttcagcggcaccacaggtgtttattaccattggcagtaacggcggcagccagacgcagtcgtcaactggttatgaacagtttggccgggagattgggcagtatgtagaccagcgttaccgggcgctgattaatacagatctgcggcccggcggtgccatctggtcggttgcgaaaggggcccgtcaatgattgaaattttcacctggtgtccccgtgttaatcccacggaggacatcacctataaaacccgcagggcgaagttcggtgatggttatgagcaggtgtccggtgacggtcttaatccccgcagccagaagtggtcactggaatttaccggccgcggggagtatatcgtggctatccgtcagtttatcgaccgtcacggcggtataaaggcttttcagtggaaacctccgcttgagccggtcggtctgtaccggtgcgacgaacataagctcaccccgctcggcggtgacaactattcactttctctcacttttacccaggcatttaaaccatgatcacaaatgactaccagaagctggaaccgggtaatgccgtccggctttttgaggttgacggcacggagttcggtgcgccggatgttttgcggttccatgcctgcaacatcccgcactcagaggcggaaattactgccgctggtggtgatccggaaaaattaccggcgaaatccatctggtggcagggcaatgaataccgtgcctggccggtacagattgacggaattgaggcatcgacaaccggatccggcgcacagccgaaattatcggtggcaaatctcgacggctcaattaccgcattgtgtctctcttatgacgatatgctgaaagcgaaagtcacgatacacgacaccctggcacactatctcgatgcggcgaattttccggatggcaacccggcggcagatcctacccaggaaaaagtctcggtcttttatatcgacagcaaatcctcggaaaccaaagaggttattgagtttgatttagccagcccgatggatttgcagggggtgctgatcccgacgcggcaactgcatgcaatgtgtacctggtgcatacgcggcaaatacaaatccggtgacggttgtgattatgccgggcagaacgggtattttgacaaacacggcaaccgcgtggatgacccggcacaggatcagtgcagcggcatgctgaataccggctgctttccccgtttcggggaaaataatccgatcccgttcggcggctttccgggaacctcattactgaggaaataatgatgcgtaaaaacattcaggcagctatttttgcacacgcagaacgtgaatacccccgcgagtgctgcggggtgattgcgcaaaaatcccgtgtggtgaaatatttcccctgtcgcaatatcgcggtttctccggaggaacattttgtcttatcgccggaagattacgccgctgcggatgattggggaacggtgatcggtattgttcacagtcatccggacgccaccactcagccgtcagaactggataaagcacagtgtgatgcccttggcgtgccgtggtacatcgtcagctggccggagggggatctgcggactgttcagccacgcggtgaattgccattacttggtcggccgtttgtgctcgggtttacagattgctgggggctggtcatgagctggttccggcaggaacacggcattgaactgtcggattaccgggtggattatccctggtgggagcagggtgagaaccgttacgccgataactggcgggaagcggggtttattcaggtcgatgatccgcagcccggtgatgtcatcgtgatgcaggtgcaggcaccggtcgccaatcatgccggtattctgctggatgataatatgctgcttcatcatttgtacggacacctgagccagcgggtgccgtatggcggttattggcgcgaccgcacagtgatgatcctgcggaaaccataaactgtgattcaattcactttgatatgtaaggaaaactaattaacatatgtgttctatttacaattaaaagtgattattttaatgaaaaaaattttagtattacttgctgctgtatttgttctttcaggatgtcagtctttacctccgcttaactttgctattcaggatgttgagccgtcaaagaataaaattgatggtgaacttaaatctgtatctgtctctttggcgtcaccagaagaaaaaaaaggagatatagaggcaggaatggaagcagtacctatgctttggaaaagtgcgcttgatgacgctttagcaagaaacgtaatttttaaagatgactcaaccagaaaattgagtctgtctgtgaaagttctggctattaacagtccatcgtttggcgcagaaatgaaaactgtatcaatagcaagatatcaattaactgacagaactaacggtaaagttgtatacagcaaagaaataacagcagaaggtgtcgttccatttagttatgcatttgccggaatagttcgtgcaagagaatcgataaatcggtcagttcaaaataatatttcagaatttttgcaggaattagatcatattgatataaataagccttattttggcatgtgatttagtaaatcaattcagtaattacatattttaagccgcttcagcggctttttttacgggtgaaatatgtcacaggaaatcatggtgaaaattgtactcggtggtgtgctgggtaaaacctttggcaaaacacatcagcgcctggtcagcacaacctcggaagcggtccgtgcattgtgctgtactatcccgggctttgaacgttacttgaataccagtaaatcccgcggcttaacttatgcggtatttcgcgggaaaaagaatatcggggtggacgacctcagttttccggtgacggatgatgttatccggattgtgcctgttgtgatcggcagcaaacgcgggggattgctgcaggttattttcggcgcggtgatggtggcagctgcgttctggacaggcggtgcgtcagtggcggcatggggagcgatgcataccgggctggccatgaccggcgtatccatgatgttgggcggcattatccagatgctgtccccgcagccgggcgggcttgccatgaaagaccagggcgaaaacaaaccgtcctatgcgttcggcgcaccggtgaacaccgtttctcagggctatcctgtcccgatcggttacggtaaacgccgcatcggcggcgccgttatctcagccggaatttacgtcgaagatcagcagtaaccctttctcagttattcagcaggaaatccacaatgacacaaatcacaggccgcaaaggcggcggtggcagcccgcgcacgcccgtcgaacaaccggacgatttacagtccgttgccaaagcaaaattactgatcgccctcggtgaaggtgaatttgccggtgagctgaccgggaaggttatttttctggacggtaccccgctgctgaatgctgacggttctgaaaacttcccgggcgtggtgtgggaataccgtcccggcacccaggcacaaacctatattcaggggatgccggcggcagaaaatgaaatcacggttggtaccactgttcagagcagcacaccgtgggcacacgcattcactaatccgcagctgtctgcggtccgcgtccgcctgaaatggccgtccctgttccgccaggaggataacggggacatggtcggcaatgaagtgaaatacgccattgatttacagactgacggcgggagctggaaaaccattgtggacggccgcgtaaagggtaaaaccacttccggttatgagcgcacccatcgtattgatcttccgcagtcggccatatcctggacactgcgggtgcggaaaatcacagaagatgccaacagcgcaaaaatcggcgacaccatggtgctgcagagttacaccgaggtgatcgatgccaaactgacctatccgcacaccgcgctgctatatattgagtttgactcaaaacagtttaacggctctatcccgcaggtcacctgtgaaccaaagatgcgggttatccgcataccgtcaaactatgatcctgaacaccggacatattccggcacctgggacggttcgtttaaatgggcatggaccaataaccctgcctgggtcttttacgatattgtcatttctgatcgcttcggcctcggtgaccgcatcaaaatgcagaatatcgataaatgggaactgtaccgtgttgcgcagtattgtgaccagccggtaccggacggcaagggcggcagcggcactgagccgcgctatatctgtgatgtgtatgtgcaggatcgcaatgaagcctataccgtgctgcgtgactttgcggccatcttccggggtatgacctactggggcggcaaccagattatcaccctggcggatatgccgcgtgatatcgattacagctataccaaagccaacgtactcgacggtcgtttcacctattccggcagcagcagtaaggcccgttattcctctgcactggtgtcgtactcggatccgctgaacggctatgccgatgcgatggagccggtgtttgaaaatgagttggtttaccggttcggctttaatcagctggaaatgcccgctatcggctgtccccgccagtcagaggccaaccgcaaaggccgctggggaatactcaccaacaacaaagatcgggtggtgacattcggtgtggggctggacggcaacattccgcagccgggctacattattgcggtggcggatgaaaacctgtccgggaaagtcaccggcggccgcgtcagtgcggtgaatggccggagtatcacactcgaccgcaagccggatgccgcgcctggcgaccggctgatgctgaacctgccgtccggaaaatcacaggcccgcaccatccagatggtcacggataacgtgatcaccgttaccacggaatacagcgaaacgccggaaccggaatgtgtctgggtaacggaatcagacgagctgtacgcccagcagtaccgggttgtgagcgtgaccgaaaatgacgacggtaccttcacgatatctgcggctatgcatgacccggataaattcgaccgtatagacaccggcgcggtactcgatgaacggccaatcagtgttattccgccaggtaaccagttcccgccgaaagatattactgtcagctcttattctgtcgtgaatcaggggatcagcattgaaactatgcaggttacctggtcaccggcggagaacgcgattgcttatgaggcgcagtggcggcgtgatgacggcaactggatcaatgtaccgcgcaatgccacgacttcatttgacgtgcccggggtctattcaggccgctatctggtgcgggtcagagcgattaacgcagcggaaatctccagcggctgggggtattcagaggaaacacggctgaccggcaaggcgggggatccgccggtaccgctgaacttccgtgcgtccacgctggtgttcgggatcaaacttaactgggaattcgggaaatttacggaagataccctgaaaaccgaaattcagtacagcaaaaccaacgatggccagaatctgttactgctggccgatgtgccgtccccgtcccgctctcacgaactggccggtctggccgccggtaccgcgttttatttccgcgcccggctggtggataaaaccggtaaccagtccccctggactgagtttgtacgcggtgtggccgagttcgatacatcgaccattattgatgaagtagccgccggattgagtgactctcaaatcatcaaagacttgcagtcgcaggctgatgacaacttcgaagccatcatcaacaacgccaacaacgcatacggccagtggggctgctggcagcgcgaaaacggcgcgatgaaagcagaaattatcgaagtccgcaactacaccgtcacggaaacgaaggcacttgcagagaaactggacgcggttaaggtgactgcagacgacggtttcgccatggcacaaaactccattcgcgcgcagtgggacatggccgccggtgaagcatccgttgttcacgatatgaaagtccggatccg

SEQ ID NO: 83 - DNA, 258 bp, unknown
  Altogen 322075 strain
accattaaagaggtttattttcctgccagagttcatccgaaaacacaaatgatcgcagccagagcatcattctgggtcagaataggcggtcaggcgtttgacaatacgaataacaatgcttttgtctcgatgcctttccgcgacggtcccggcggaaatatagaaatctgggagtttggcaacgctcctgttaaggtgcgtaatcaaaaaacgggaatagttgtgataaacccgctaaccaatcaggtggtatataat

SEQ ID NO: 84 - DNA, 953 bp, unknown
  Altogen 322075 strain
agctttatctttgaactgacctccgccaaagtcggtacagttaccctcaacggtgatgtgacggaaaaagttgctgatggtgtgaacgcctttacctacaccgcacaactggtggacggcaacggtaacccgatccgtcaggccggtctggatattaagtggacgcaggataaaggcaatgatgtgacgttgtctgctgtcagcagtaaaaccaacacggacggtcaggccactgtcacactgacgtcgaccacaaaagcggtggatgatgtccgtgtcagcgggcagtacgaaagtaccgccaaagcggcagcggataaaacggtcagctttatctataacgttaatctggccaaagtcagcactgtgacccttgacgacgctgttattgaaaaagtggcggatggtgggaataccttcacttacaccgcacaactggtggacggcaacggtaacccggtccgtcaggccggtctggatgtgaaatggacgcaggacaaaggtaatgatgtcgtgctgtcttcggcaaccagtcagaccaatgctgatggtaaagcgactgtcaccctgaaatccaccaaaaaagctgtcgataacgtcacggtgaaagcacagtacaaagaaacggctgaggttgctgcggataagacggtcagctttatctatgaactgagttcagcccgggtcggtaccgtgaaactggatggcactgtcacgcagaaaatcgcggatggcaccagcttctttacttataccgcacaggttgtggacggtaatggtaacccggtccgtaaagcggatctggtggtgaactggacgcagaacaaaggtaacgatgttgttctgtcagccacaaccagtaaaacccgtgccgatggtacagccactatcacgctgaaatcgacaaccactgcggtggataatgtcaccgtcagcgggcagtacgaaagtac

SEQ ID NO: 85 - DNA, 1734 bp, unknown
  Altogen 322075 strain
cccgccggagcgggttgttgtgttttatttgctgaaatatttaatattcagtccattcagtatcccggggaataaaccggaatataattttattgaaatataagtattctttctctgtcaaaaccatgttcaccagcaaagctgagatactcatttaacagctctggcggcatagctggtgttcgtgacaacacccacaggtaatctttatcggggccaacaaccagtgagtactgatagtcatcatcaagcttaataatattgtaacctccatagaaaggtccgaagaaagatacctttaacgccccagtatcagctgagttaacaaaataggcctttccggtactctctttccatttattgttactcgcatcccaacccctgttgataaccttgacaccaccatcatcacgaagagaatagttagctgtaactttgcttaagcctttttcaaaacgattatctatcctggcaatttcataccagtcacctaagtaatgagataaatcaaaaggtttaaccggggttatatctttgggtaccttgacactgcatccattaagcagaaacatgcccaaaaacataaaaactgactttatctgcatcataacctcatcaagttattaaccaatgagatactttcgcataaaaaatgtgtttgtacgatctattcgatattcagctgtagtcattacccttgtctcaataccatcgatacacaagcggatctataggaaggttctggctggatgcatgcatggctgatttcctgcaggtaaggtaatactttacccaacaccataaacgcctgacatatgattcactttatcttaatgaatcacattcgtaaaaagccccgccatttagcaatggtactattgatttaccagcaaaattgcctgtatattgagcatcgtagttagagtaaatattctttatcaattgcctatttgccctgttcttgcagggcattttttatttgttccgcatattgtaattacggaattatcggggatatactcaacccgaagatcacaataaaaatatcctgaatcttttatatatgccccctcgtcatggggggcttttttacttcattctctccgcttctatctcccgtattgaccgcttatcgtgattacagtcagctatcgacttcatggcatcagccagcaacaggattacatcgccgtaggtaagttcatcaggaataaccggctgcggacaatcagcggtcaattgtggcggtatcggcaccaccggcgcgggaacgtattccgtccgcgtatttccgcaactcactaacagcatcagcgggaacaggagcaacagcgcattcgctgtccttaaatactgtcctgataacagtcttaaatttgacattctccgtgccctcttcctgtttggctttgatgttgtcgaatgccacgcggtgtctgatggcaacggctgaaagcgtgatggtgtttatcgtctgttgtgctgacagctgtccggacaacgttgtgttattcaccttcagttgctggttatcccggtaaatgtcatatacccaccagacagcagcaataaacagcgcggcaattaccgtttctttccagttcatggcgcttcacactcataacagatcacaccgtccagcgggttacccggcagtggcttacagtgagtatcgagtgaatacagataacaacccgccaacaggcaggccgtcagcaggatgatagcaatgat

SEQ ID NO: 86 - DNA, 36538 bp, Unknown
  Altogen 322075 strain
gctgcagaagcggctgcattcggtgcggagcccataccggcctcattcgaaaacagaccgcgttgcacgccgttaatcatggcctgcgccacgccgtaaccgacagcacctgacacagcttcctgtaaaccaaaggcacttttgataatcagcataaagacatccggcagacgctcggcgtaatgccccatcacccagaaagcgaggataagatacgcaaccgccatcaccggtaccaccagctccgccacacgggcaatcgagcgcagaccgccgaaaataatcacgccgcagataaccaccagcagggcaccgacataaccggcatccgcaccaaaggccattttggacgcctgggcaatcgagttagcctgaaccgcgttaaagaccagcccgaatgcgatgatcaggaagacagaaaacagcacgcccatccagcgggctttcagtccgcgttccatataatacgccggtccgccacgataatttccctggtcgtcccgtgttttataaagctgtgcgagtgtgctttcgataaaggatgttgccatcccgatcagggcgaccacccacatccagaagatagcaccggggccacctgcagtcagggcgatagccaccccggtcaggtttccggtaccgacccgcgcggccaggcttgtacaaagcgcctggaacggcgagatgccggatttatccgatttcttactgtgctttagcacgctgaacatgtgtccgaagtgacggaattggataaatccggtacgaaatgtgaagtacagtccgatacccagtaataaatagatgagcaggtggttccagagcagtccgtttaatgtattaattatatcggtcaaagttatacctcttatattgctgtgctgatttgcggcgaataagccccttaacgaatgacaggtagtatccgtgttgtcatatctgacagtaattgtttaaaaaaaagacacctcttattaagaatcaacccgactttaccataagaaatatttccctgtatatttttttatttctttttttcgttctatttatcagcgttactttttcgcattaatacagcgtttaatccgaactatcaactcaatgaaatctatccaaaacacatataaattctttgttttcatgatgttgtgatttttttattttatatttttattcatcaagtaatactttcaatttatcgccctattctgttttatttcctgacattaaaacacatgattaaattaatattaaaacaaccctcttaattaatcgttatttttacagaattggataatttaaagatctcacagagcaaaacagaaatgataataataaaattcagataaaaaattaaaccgttaaataaaaacgccggttattacaaaataatataccttttttcattaccggaacatgcagcaacaccggggctggccgtcatccagctgatcaccgctcacctcaggcaggctctgattccggggcaaactttgctctgtgacacactcctgtgaaaaaaagctttcaccgcagacctgtttccgctaacatagcgctatataatctgttatataccggattgtatacattgctcttaatatatttttgccggtcagctggccggcaatttttttgtctgctatatctgattatgactacagaaaatgtgatccggcccggtattcagcataaagacaggaataaccgtgtagtaattttgtcattaatcattattatcagaacagataatcgtgcatttcttcgttatttttctttatttttgctcccttacgggagcattttcttatcagccgggctgtaaaacaccgctgccggcacggaaaatcataaaaattcctgtgccggcagcagatccgccatgatttatcacgcggggtgaggtacactacccgcatcagtttaactaatgtaaccgttatgtcctctgcacagattttactgactatctacgcaacaggtggtcttctttcattcattctgacttttttcctgacaaaagatccgaacccgtttttccgcctgctcagctgcctgctgatagccctcacctggccgatgtcattaccggtggttattttattctctctgttctgacaggttttaaacccacaatattcccgcagtcaccaccagacaaaaaagcatcagccgcccccatgtcagagtactgccatgctgctgccataatgcatttatttcaggtgccagtgcgtagccgcgctgacaaatacggcggcggatatggcggttaaggaaaagacggaacgaaccggactgtgatgatttcatacatgcctctgctgagaataagagaacgcatgtgaaacctgaaactcccgaaagataattattatgaagacatcataaaagagaaccgcaaccacaaaaagggagggattatgcggctgagttctcctttattgagaataatggctgataacaatcagtccagtgcattgatagctttttcatagatgacattcataaagtcatcattctgctgttcccaatatatttccagcatcacctgaatagcttctttagtaaccggctcgccacttttgcataaaaggacagcggctctgccgattgcctggcaaatttcgccgtaaacatatgcgtcgctaactcgttctgaaatcatatttgtgcctatttattttaatataactactgcctttccgtctttacttaagacatcagggcattgctgttgactgacactccggtaagaattatctaaaaattccctgtgatttattatcgtcacattacgtttaatgttcaaagaaaaacatattattccggagaatatttttttgagaacagcgaaaagagactagtatcaaatagttatgctactttcgtgttatcattgctacggattgttacttttaggttgattattggttaatactatatcatgcgatatgtgcttttccgctattaaaatacataaatttataaatttttacccgcataaataacgtccttttttcccggtaaataaaatatattaaatcacttcgccatactcatttatggattattataatcatataaaatctcaatactccctcaacaggtagtgattcacattattcctttactgtttgtgtgggaataaaggtatttacacaatatacgcatataagtattaaccgatatataccactcgtttaatacgtagttatgatactttagttaatcattattttattaataacagtaataaatcagctaagccatactattattttttatttccttatttaaataagataataaaacatttcatcgtaattacgcctaatcataatttgaatacacttattaccggtcaaaaaaacaggttattctgaacagcgggtaaacacacccgatcttccatatttttaaacaaatctgtcgtaaacaagacatcttgttttacaatatattaatatttaacatttaccctgcaaaaatcagttttttatagttgtatttctgtacatttccccttatcatccgcgcctttgaatagtgtgtctctcctttatttatctgattgaggttctatgagctctgaccgtattgcgaatccaggcccgctgggcttactgggatttggtatgacgactatcctgctgaatgtccacaacgccggattcttcccgatggcttctgttattctgagcatggggattttctacggtggtattgcgcaggtcatcgcgggtatttttgaatttaagaaaggaaatacgttcggtgcgactgcctttacgtcgtatggctttttctggataagtctggtcggcatactgctgatgccgtcaatgggattcggtgaagcaaccagtcatgaattcctggctgtctatctggcactgtggggtattttctcgttctttatgtttattgccacactgaaagcaaacctgaccctgcgtgcagttttctttttactggtgattttatttgccctgctcgttatcggtaatgctaccggtaatgccgcattactgaaatttgccggttatgaaggtattttatgtggtgcgactgcattttatctggcaatggctgaagttctgaatgaacagtatggccggacaattttaccaatcggtgaacgtcacgcctgatgacacgatttctgtataaaaaaacccgttcagtgaacgggttttttttgtctgtaaaacggggatcagaaactcagacccgcgcccagataagcgccatccgcaatacggttttcatgaccgctgttggattcaacttcaatcttacggtaaccggcttttacattcagcggagcaaatactgtccagtttgcaccgacatccgcttctttataagagtcgttaccggaagtcagacctgacggtgcaccgtaaaactcaccgtaaacacgtactgacggcagaatgctccacgcaacaccgacacccggtgccacggccatgcctttcttacccacttcagggtcgatgtaaaccgctttaccgccgacacttgcagaaaccggacccaacgggaaagcaaatttggcacgcgcgccgcctaactgcccctggtgatcactgcgcgcccagttaccgtcaaatgacagaccggagtacggatcacctaagcccacattgatatcagtaaatttcttaccggcttcaacatccatagagattgcgtttgcagcacctgccgcaagcatcagtgttgcagccacagctgctttatattttttcatttttgccaccacattaattcagacagggtttcgggcattttccccgaaactgtcaccgtttgaaagttaatattctgatttttatgtaaagttatctatatccgccatcaataggtcacaccaatccatcaaatcgacacattctttttatgacagtgctatattttataccaagtcataaacacagataaaaacaacaatgctcagtgcaatttatgacttaccatgctgattttgcacatcgcgccaatttctgcaatcagtgtcttttttcctttaccgactggagatatgtgatgaaaaagaaaggattaacaacggctgcgggcgcacccgtcgttgataacaacaatgtcatgactgccggaaaacgcggcccgatgctgttacaggatgtgtggtttctggaaaaactggcgcattttgaccgcgaagtgatccctgagcgccgtatgcacgccaaaggctccggtgcgttcggtacatttacagtaacccatgatattacccgttttacccgcgcaaaaattttctctcaggtcggtaaaaaaaccgatatgtttgcccgcttctccaccgtggccggtgagcgcggcgcggcagatgcagagcgcgacatccgcggctttgccctgaaattttataccgaggaaggtaactgggacatggtcggtaacaacacgccggtgttctacctgcgtgacccgctgaaattcccggatctgaaccacgtggtaaaacgtgacccgcgcaccaacctgcgcaatatggcttataagtgggatttcttctctcatctgcctgaatccctccatcagctgaccatcgatgtcagtgaccgtggtctgccgcagagctaccgccatatgcacggcttcggcagccatacttacagctttatcagcggcaataatgagcgtttctgggtgaaattccatttccgctgccagcagggtattgccaacctgatggatgatgaagcagagcagttaatcggaaaagatcgtgaaagctcacagcgtgatctgttcaatgcgattgaaaaaggcgattatccgcgctggaacctgcaaattcaggtaatgccggaaactgacgcggcaaaagtaccgtataacccgtttgatctgaccaaagtatggccgcatgcggattatccgctgatggatgtcggttatttcgaactcaaccgtaaccctgaaaactatttctccgatgtggaacaggcggcattcagcccggccaacgtggttcccggcattggtttctcaccggataaaatgttgcagggccgtctgttctcctacggcgatgctcaccgctaccgtttaggggtcaaccaccatcagatcccggtcaataaaccgcgctgcccgttccacaactatcaccgtgacggcgcaatgcgtattgacggcaacagcggtaatgcggaaacgtatgagccgaacagtgccggtctctttcaggaacagccggatttcagcgagccgccgctgtctgtggacggtgccgccgaccactggaaccaccgcgaagataccgattacttcagccagccgcgtgcgctgtatgaattactcagcgacgccgagcatcagcgtatgtttgcccgtatcgccggtgaactggtgcaggcagccgaagaaacacaagcccgccagatagcactgtttaaacaggtgcatccggaatacggtgccggtgtggaagccgcaatcgcgaaactgaaaaaataatcgtgtgataacctgacaaaaccgctgcagtccgtgaccgcagcggtttttttatatgcactcagttggtatgaaaacgatcctgcgccatctgaatcagcggtgcgcgggtacgtttgataccgctgcccgcatccgcttccggtaatgcatagcaggccgccggacgcataaaggccggcagttccgcctggcaccagtcactgaaatgctgccgctgttcgtctgtccagtcatcataatcacggatcagatacaccggtacggcaccaaactcatcgctgctgaccggtaccaccagacactccgtgatcagcggatagtgcatcagctgcttttctgtcacttccggctgcacattctcaccaccgcagcagaaaagattatccagccggccgtcgatcaccagctcaccgtcctgcatatggcctttgtcacgggtcggataccagccgtcatgagaaggtagtgtatgcaatgcaccattcagccagacaccggcagcaaaactgtcacctttgaccagaatttgctgttgttcatccaggcggatatctttgccggacagcggatgtccgacacccggtttgccatccgcccgtttggcacagacagttgaggcaaattcagtcataccgtagccgcaccagcagcggatcccgcgggcttccgccgcttccgtcagcgcaacagggatagccgcaccaccgagcagaacatcccgcagcggtggcagcgtgtccggtgactgcagcagacgccagagctgtgtcggcaccagcgaagcatgagtacatccgcgcagcgattccgccagcgtttccccttccgccctgagaaccatttccccgccctgcagcagccagcgccagagaatcccctggccggaaacatgacacagcggcagcgataacagccagctgtcacccgcctgatagttcagcagcgagaccacgccctgtgccgcagccagatgtgcgaccggacgatgggcaatagctttcggtaacccggtggatccggatgtcaggatcagtgttgccagccgtttcggatgaggaatcacatccggcggtgctgtgccggtcacggacggattcagtgtcttcagcggcagcgcgattgtaccgtcgctgcggtcacacacataatccgcatcgagtgacgcgaccagttctgtctgtaacccgcgcggcagtgcgggattgagtgtaagaatcactgccccgcagcgcagcagcgccagaaaatcgatcaccagttctgtgctgtttttgccgcgcagcaccacgcagttactttcccgcaatccctgctgataaaacccggcggcgcgggcatccgcaagggccgccagttctgtccatgtcagcgatgagtccgcacagcgcagcgcggttttgtccggtgtctgctgagcatgcgcaacccacggccattgtgctgccgtcattaccattgtcctgtctgagttaattgatctgcagttatcagtgtcagtgtgctgcccggccacggacgcaccagctgtgactgcatcagggaaagtgtatccagccccggcagggtatccggcgtcagccatccggcaagacgggccagttgtgtcaggccgaaactgctctccaccgaggagctgatcaccgcctgcaacccttcacggtgcgccgctgtgatcagttcacggcagcgggcgatactgcccgtcagcgtgggctttatcacaatcgctgccacgccgggctgtgctgttaccgtaaatcccggttcacggacagattcatcccaggcgatagcgattcccgtgtcctgtgcataacacagggattcttccggcgttttgcacggctcttcgagaaaatcaatccgggcgcggtgctccggtgccacatatttcgcgaaaccgtccgctttggtgcgggtccagctgcggttggcatccaggcgcagacgcagatccggcaccgcctccagcagcagattgaccaccataccgtcacggaccgcctcatacagcccgactttcactttggcgattttctcaccttccatggcatcgagcgcaaggatcaggtcatccgggtcaccgatacagagcggcgctttgcgggtattgagagtctgcggcagcgtatcatccagctcggcgagtgcgcagctcagcccgaatgcgactgacggcagcgggttttccgccggattgctgccctgacaccaggccgtaatccacgcttccgccgcctgttgagcttgtgcaagcgtttcatggctgaattccggcagcggggagatttccccccatccttcgcggccatcctcccgcagacagaccagcagtccgtcacgggttttcaggcgctgattacgcagaataacgccagcctccatcggcaggctgaaactgtacagtgtggcgtggcgcattacgggttacgtttaaatttagagaaatccggtgagcgtttttcgttgaatgcgttacgcccttcctgaccttcttcggtcatgtagaacagcatggtggcattacccgccagctcctgcagaccggactggccgtcacaatccgcattgagtgccgctttcaggcagcgcagcgccatcggactgttttccagcatctcacggcaccagcgcacggtttctttttccagatccgcgtaaggcaccacggtgttgaccagtcccatatccagcgcttcctgtgcattgtactgacggcacaggaaccagatttcacgggcttttttctggccgacaatccgcgccatataagaagccccccagccgccgtcaaatgaaccgactttcggcccggtctgaccgaataccgcattatccgccgcaatggtcaggtcacaaatcatgtgcagcacatggccgccgccgatagcataccccgccaccatcgccaccaccggcttcggacaggtacggatatcacgctgtaaatcgagcacattcagatgatgtgtgccgctgtcatcacggtagccgccgtagtcaccgcggattttctggtcaccgcccgcacagaaagctttttcgccctgtccggtaaaaataatggtaccgatgccgtcatcataacgggcattcgccagcgcactgatcatctctttcactgttaacgggcggaacgcgttgcgcacctgcggacggttaatggtgattttggcgataccgtcttttgatttatgaaacagaatatcctgataatcgccggtgcagtcgacccattcaaccggggcagagagcttttcttcgctcggatacatcatagcggtgagttccttaaacagaatgtaatgataaaaatgtccggactgtctccgcaaacgcggcgggatttgcctgatgggtgttatgcccggcatattggatagtccgtaacggaaaatggtgtgcctctgcaatggcgcggaatttgctgtcccgctcaccgcagagatagagcagcggcagattcagggcatgcagtttctccgccagctgcggctgatgcccgagggaggtgtccgacagcatatccgcgatcgcaaaagcattatgatgcagatgctgttctacccgctgctgccgctgcacctcattgagatcagcaaaaacgccctgacgataccagtcatacagcaccgatgccagcggacgttcacgtaactgttgtgcccagcggttatcatgcagcagccgggcattgcgttcatcgagtgtggcaagcccgggattcccggcttcaataatcagaccgcgcaaccctgccgggtcgccgtatgcggcgtgatacatcgccagccgtccgccgagggagtagccaatcagccagtaatcgtctgtctgatgtgcggccagggtatccgcaatcagctgactgacatgcggaaaattttttgcgcggacggattgtgagccgccgtgacccggcaaatcaatcagtaatgaaggatagtttccggcttctgctgctgccgtcagccattcttctttatttccccacagaccgtgcagccagaccagccacggaccgggcctgtccgcataacagcgctgtgcggccagaaccgtcattgtgcaacctcacggaccagctgctgaaggtattttgccccttcgtcgccgtttgtcaccacctcaatcacggtcgcggaatgctgtgaccaggctttgctgacggcggctttcagtgacggccagtcctgcggggcactgtagctgaggccgaacatctgcgcggcaccggcaaaactgaccgactgcggcatacagtaaaagcgctgacgctcttgttccggtgtcggcagcatggaaaagatttgtccgccgttgttgttgacgatcagcagaacaaacggcccggaggtataacgcagcagtgccaggctgttgagatcatacagtgcggagatatccccgacgacagcaagtgccggtttggcactgccgcgctgaacaccggccgccgtggaaatcaggccgtcgataccgctcgcgccccggttgctgtacaccggatagccgcacggcagctgagcaaacgcatcaatcagccggacaatcagactgttaccggcaaataatacgccctgcggcggcagcagttccggcagacggcaggcaacctgcgcttcgccccagccatcgcccagggtttctgtaacatgcgtgttcagtgcccgcgtccattccgccagttgcggagcccacggtgtgcgggtttgtgccggatggtcatccagccattcgctgacactgcactcaaatttgcggccccggtgatttgccgggtccagccgtccagggatggtatccacaatccagtattccggcggcgtgcaggcagcctgccactgtaaaagccgtttgccggtcaggcttgagccgaactggatcaccacatccgcctgagccagtacttcgcggtaacgcggggatgccagccagagatccgcatgcggcagcagttgcccggtctgggaaagcacatcactgatcagcggccagccgaggcattcagcccactggcgcaactgtttaccttcggcggcctgcatacgtccggcaataatcacaccttttttctgccgccagaagaaccagtcatccacgctgatcaccgatgtacaacgggtctgctgcaaccagggtttatcactctgccaccagttgccgagttgtgcctgccattctttgccggtctgtccgtcatcgtcatacagcggctcagcaaacgggcagttaatatgcgctgcgccatgctgcaggcggttcatgatgtcatcgagggaagagaccagccaggacgccgggatatcaaagaccggacgcggcagcgccagtgcagcaaacggatgagaagaaaaaataccggactggcggatagcctggtttgcaccgcagtcaatcagttccggcgggcggtcggcggtcagaaaaacaaggcgttcgccggtcagtccggcctcaatcagtgccggataaagatttgccaccgccgtaccggaggcgacaatcaccgccaccggcagccgggtgcttttcgccagccccagcgccagatgcgcgagtccgcgctcatcaaaatgggtgtgacagataaatttgtcatcggcggcggcagccagtgtcaggggtgttgaccgggatcccggggcgatacagatatgacgcagcccgtgacggctcagcgcctccaaaatcacttccgcccagcggcggttcaatgcactgtttgacatagctcacctttcctgacctgtagttctccgtagtctacggattgactcaggaaataccttaatgtagttcaataaaccggtggattatttcacggtttctgccccggcaagcagaaaattgcacaatcagtgagcgtcgctctccagcagtgttctcagacccgcggctttattttcaatttcacaccactccgcctgcggatccgaaccagcgacaaggcctgccccggcatacaaatccacccggctgccgctgattttcgcacagcgcagcgacaccgcaaattcgctgcgtgacgggctgcaataaccgccgctgcctgcataccagtcacggtcaaatggttcgttatcccgcaaaaaggccagtgcggcactgcgcggcagaccggcaacggcggctgtcggctgaagacgctgtaaacaatcactgtcacggggggcatataacgtggcagaaataacacggtaaagatgctgcactttgcgcaggcggatcactgccgccgcactcacatccagcgcgctgaccgctccctgcaggcgctgacaaatatcatcaaccaccacactgttttcatgcacattctttttatcagccagaagccattgcgccgcttgtgccgcgcggtcatcttcctgatagtttgccactgttcccgccagcgcttcggtatacaactgagctccggccctgaaatagaggcgttccggcggtgaagccacaaacgcagtatttggtccggtggcaagcatatagtgaaaacagcggtgattgcagtcacaactggcctgcataaatgccgccggagagaccggtgcggagagttccagtgcggtcttacgggccgtcaccactttttccatttctccgccggtaatggctgtcaccgcatccgtcaccagctgtgtccagcccgcttcatccggctgatgccgcgcactgataaccgtgctgttcaatgccggaatttctgtctgccagaccagcgaacgcagaaattctgtggtctcttccgccgggcggcggctgtcaatattgaccagaaagtatgtttcactgccggatatccgcaattcggcgcggggaacaaacaggtaactgccgccagtgccttgtgccggagacggggtatcaaactgccagctgttcagtccccagatccggatttgactctgtgccggtaaggtatccagcagcgcctgagcatcactgatatgcgtgaaacggcacacttccccgcacactgccgctgtttctgtgccgtcgcggtgctgccagtagaattgcggccagcaggtctgcgcattcagccagccggtcagggctgacggggggaataccgctgccagtgacggcggcagagtcaccgcgtactgataaataccatcgggtttatttttgttatgcgttatttcagtacagacctgagaaataaaatcagaaaaaagagtcactgcttgctccggatatgcaaaatgcgcgggtctctgtgattatacggtgagataaaaattattaaaaccatccttcttttttatccttgtcaccgttgtgcattttgaacaattaatgcggaaaccgattctgcttcggccccattcaccacagagttacgtatctcattacagggagatatttatgcacacacaaaccatgccggctgaccggattattacagcggatgaaattgcccccgccacgttaaagttacttctgaatgaagaagacgatactttccggcctgcgggtatattcacacacaatgatctggttcatatcaaacgttatattcactacggaatgacccttccccgggaaacagaagatgttattgagtttatcggataccgagatacagaactgcccggttttgagcctcataatattcagcgtttatttgtccatattcatcagcatgctctgagctgggagcatgttgaatccatgacaaaacaacaggcgattgatcttgaaattgccggtgccgctattacggcaaccggtaactatattctgaatgccatcaatgaaatgccggtgatccgccgggctgaagttttattacaggatgcaaccgcggataaattaaaagatatcacttacaggaggcaggacaacgttatttccggagaactgacaaaaatattatctgccatgaaagacgatattacggaagaacggcaaaaaacacagcaggtgaaaaatatcatttcccgcttccggctggaattaaccggcggaacagatgaatccgggaatgagattccgtctctgatttatgaagtcaaacgtaaacaaaaaatattattaaaaaaccgggatggtgacaccacccgcgaactgcagtctgagatacgggtcagaaatgaagagattgaaattctgaagcgcgagtacagccagtttgtgaagctctcattctccggtctggtcggcggtattatcgggctgataatcaccggtggtattttcggttaccgcgccgaacaggtacggcgccgtaaaaacaaactgctggaagaggtagcagagctggaagaacagattattgcccggcaaaccatacagcaactgattatcaggctggataaagaactgagcacactggatggttatttcacggatgctcacgttgccgtcgatcatctcgattttatgtggcaggtcatgctgaccgaaattaccgaatccctgaatacttttatgcagataaatgatgcatacagccttttacagttttctttacagctgaaaaaaatcaccctcccctggcaacgtgtccgtggttatgcaaaagaactcgtcgctatttttgatactgctaaccttgcagcataatgaaggagattatcatgatgcattcagacaccagtcctgaacatatcacactggctcatcttaaagccggaattcatgatatcagtaatgacacagaaatattatcactccctactgctgatttacatattcagctccgcgatataaaaaaatggcagacacggatgctgaatattatttcatcagaatccaccgttatttattctcagctgcataattttgatccggatagtttatttttcgcactcccgccggaggcagggttaaatcccgtttcactgcctcatgaaaaacagatttatgaatttctgctgagtcagattaattcagtctgtcattcagtgaatacggttaacactcagtttaatactgaatatgacgccaccgctattccgatgcttcagggagggttattacaccatcagtcttttctggacagagctatcactgttgcgctgccggatattgagaaatttacctgcgataaattatattgggaagaaaaactggcggtggttattcagtcagaagaaattattcaccagcgcggatttcagtctgttttcggcacaacaaccctgccgactaccgaacaactgaaaaatgtggaattatcctcttccgagcggtttattctggatgagctccaccgcattatttctgctgtcgtaaatacactgacagaggggctgagctatgttcagctggtagaaacccggaccacactcagccagcggatatatgatctcagtaagctcatccgcaatctgaaaaaagacctgaagctcctgcaggagcagatgcaggaagtcagtaatgtgctggtattactgccgaaactgcgggaatttaacaaccggatcaacaccgtattattatactggctgcagagtatcagtcagtatgagccttatttaagccagaatgtccctcttcccgggctcgatactcttattctggcgcaccgccgctatttttcggtatttatcggcatggcataaaaaaaccgggctgaaatcagcccggtttttctcagtacagatatcagtaactcagaactgcgaatccggtcagtgtgataaacggctgcggccagataccgagcacaaccacgataatcgcggagagcagcaccacaataccgcctgcactcatcgcccagttggacggtgccatacgggccggtgattccgaaccgcgaatatagaggctgatcatcatacgcaggtagtaatacagaccaattgcactgcccagtaccaccgcggctgtcagccaccacagttctgcattcacggcggtcgccaccacgaagaacttaccaataaagccgaacgtcatcgggatacccgccagtgacagcatcatcacggtcatgaccgcagccagaaccggcttacgccagaacaggccgcgataggcatgcagggaatccgcatccggcccggtatacggactggacatcagactgaccacaccgaacgcaccgaggctggcaaacagataaccggccaggtagataccggctgtttcttccgccagtttcggatcattcaccgcgataaaggccaccagcagataaccgaggtgtgcgatcgaagagtaacccagcatacgcttgatgctgttctgggtgatcgccatcaggttaccgaacaggattgaggcaatcgcaatcaccgtcagaacggtctgcaatgtcccggaatccgccatcggcgcgagtaccagcaggcgcagcaccgcagcgaaaatcccgatcttgctggcggttgccaggaaggtggagactggtgccggagcaccctgatacacatccggtgtccataactggaacgggaacagtgacagtttaaagccgataccgacaatcatcatccccagtccggtcagaaccagcggctggtgaatctgactgtccgccaggctgcggcctaagccctgaaaagataagtcaccggattccgcgtacagcagcgccatcccgaacagcaggaaggacgaggccgccgcagacatcagcatatatttgatcgacgcttccagcgaacgcttctgacggaaggcatagccgatcaacccgaacagcggcaatgtcagcagttcaatcccgataaagaaggatgccaggtgatccgcgcccgacagcaggatgccgccgagtgtggcaatcagtaccagcagataaaactcttctttgttatccggataggtctccagccacgaatacgcaaaggtcgtggtggccagtgacgaaatcaggataagcccggtgtaaaacatgctgtagccgtcgatgtgcaccagcggtgtcacatccattgccggctgctgtccgacaaagtacagagacagcagcgcgaggttcagaccaacgacggtcagtgtggcattaataaagtgatcgcgtcgccacgcaatggacagcatcacaaccaccactgtcaacccgataatcagcagtggtgagagtgcgatcagttgttgaggagttattgtcatggcgcgttacaaccctgtatttgaaattgaagcagtgtaccactgctgaatgtttgccatcgccgctgacgaggtatccagcaccggctgcgggtaaacacccagaatcaccagtaagaccaccagcagcatcacgatggaaaattcacgcagattcatgcccgcgattggctcttcagacttcggtgcaccgtaatacgcctgctgcatcatccacagcgcgtaaacggaagcaaacaccagacccgccgaggaaatcacggtgatcagggtgtagctgccgaagctgccgaacaggatcatgaattcaccgacgaagttaccggtgcccggcatcccgagtgttgccaccgcaaagaacagtgacagcgcaggcaggaatttaatccgcttccacagaccgcccatctggcgcatatcacgggtaccgaggcgctcatataactgaccgcacagaataaacagacccgccgcagacagaccgtgtgcaatcatctgcaccaccgcgccctgatacgccagcatactcgccgagtaaatcgcaatcagcacgaagcccatatgcgacacactggtgtaggcgatcagacgcttgatgtcagtctgtttaaacgccatccacgcgccgtagaagataccgacgacacccagccacatcgcgattggtgtgaagtccgcagaggcttccgggaacagcggcagactgaaacgcagcagaccataggctgcggttttcagcaggatccccgccaggtcgacagaaccggctgtcggtgcctgactgtgcgcatccggcagccagccgtgcagcggcaccaccggcatcttgaccgcgaacgcgataaagaagcccagcatcagcatatactgcacaccatagctcatcggtgtattcagcagatcttcatacgcgaagctccactggccggtggcgttatagtgaacaatcgccagtgccataatggcaatcagcatcaccagaccgctcgcctgggtgtagatgaagaacttggtcgccgccccgatacgggttttgccgtcggaaccgctgtgtccccacagtgcgatcaggaagtacatcggcaccagcatcatttcccagaagaagaagaacaggaaaagatccatcgccaggaacacgcccatcacaccgccgaggatccacagcaggttcagatggaagaagccctgatacggctggttttcaccccaggaacagaggatagccagcaggccgagcagtgcggtcagcaccaccatcagcagtgacagaccatccagagccagatgaatattgatgccgaaacgcgggatccactccaggaaatactgctcctgccagtccggaacacctttcgggttaactaagctgtagttcccctgcatccacagatacagagaaagaaataacgtgatccccatcgccagcagcgcgatccagcgcggcagctttgtgccgaagcgctcagcctgccagcacagcaggccgccgatgaagggaagtaaaatcagccagggtaatagcatggcgcaatgtgtcccttatttaaaccaaaaacagcagagcgagaaccagcactgcacccagccccatagaggcgatataccagcggacctgtccgttttcactcaggctcagtcctttgttactccagcgggcaaacagcgcaggcagattcatcaggctgttcagcgggtcactctgcagcaaccagcccaccgctttaaacggcttaacaaaaatcgcatcatacaggtcatcaaagccccatgcgcggaaccaccaggccgagaagaaacgtcccggcgcggaattcgcgaccgctgtcaccagcgtgcgacggcccagccagagcattgcggccagcacaatccccgccacagcaaccacaccggagataatttcggtggtcagtttgccgtcagcagaaccggtaagagtttccgccgggaacacgccatgcagcggttgcgggataaaggcaccggcggcagtggaaagcaccatcagcaccagcaacgggaaagtatgggtaaagcctttcaccgcatgcgcctgtgtatgctctttgccgtggaacacgatgaaaatcatccggaaggtatagagcgatgtcataaaggcaccgaccagaccggcgataaacagcgggttctgaccctgaaccaccgcaccccacaggatttcatctttactgtagaaaccggcggtgatgagcggcagtgcggccagtgcggcaccacccaccaggaagcagagatagacaaacggaatttttttccgcagtccgcccatcttaaagatgttctgctcgtggtggcaggccaggatcaccgagccggaggccaggaataacagggctttgaagaatgcatgggtcatcaggtggaaaatcgccgcatcccacgcctgcacaccgagtgccagaaacatataaccaatctggctcatggtggagtaggcaagaacacgtttgatatccgtctgcaccagcgcggcaaaaccggccatcaccagggtgacagcaccgaccacgccgactaaatgcagcacttccggtgataacaggaacaactcatgggtacgggcaatcagatacacacccgcggttaccatggttgcggcgtggatcagtgccgaaaccggtgtcggaccggccatggcgtccgcaagccaggtctggagtggtaactgcgccgatttaccgaccgcaccgccgaggatcatcagggtcgcccagaaaatcaggtcagaaccggctgcgatatgctgcggagccagaaccgccagttcacggaagctcagggtacccagtttatcccacaggataaacatgccgatcgccaggaatacatcaccgatacgggtgacgataaaggctttcattgccgctgcgccgttggccggattggtgtaatagaagccgatcagcagataactgcacagccccaccccttcccagccgaggtacatcagcagcatattatcggccagcaccagaatcaccatactggcgataaacaggttggtgtaggcgaagaagcgggaatagccctcttcaccgcgcatataccaggaggcatacatgtggatcaggaaaccgacaccggtgaccacgcccagcatggtcagcgacaggccgtccagcaccagggtaaccgggatggagaaggaagcggtatccatccatgtccacagtgtctgctgatacaccccgccgccgttggcgaagaaatccatccccgcccacaacgccgtgagtgccgccagtcccaccgaaccggtgccgatggtggctgacacattttctgaccagcggccgcgtgaaaaggctaataacagaaagccaatcagcggcagcaaaatggttaaaaagagtaagttcatccgcgcatctcactgactttatcaatatccagatcctgacgctgacgatgcagttgcagcaacagtgccagcccgatactcgcttcagccgccgccagactgatggccaggatatacatcacctgtccgtccggctggttccagtagctgccgccgacgacaaacgccagagccgccgcgttaatcatcacttccagaccaatcagcataaacagcagattgcggcggatcaccagacaggtgaaaccgaggatgaagagcacagccgcgagaattaatccgtggtgcagagggatcatgctttttcctccgtgttgcgctgactgacaatatcgccgcccgctttttcgtcacgcccgatgtggtatgccaccaccagacccgccagcagcaggaaggaggccagttcaaccaccagaacatacggaccgaacagactgatacccacctgtttcgcggtaaccacctcaccggtgataccgttatcactcagtgagcggataccgtaaatcatcacgccgagcagaaccgccgaaagcaggcccggtcccatccagacagacggggacagccatttgcgttcctggtcgacaaccgcccgcccgaggttgagcatcatcaccacaaacacgaacagcaccatgatggcacctgcgtagacgataatctccagtgccccggcgaaataggcgccgagagcaaagaagaccgcagagagtgccagcagcgaggtgatcagatacagcagcgcatgcaccgggttagtctgtgtgatcacacacagcgtggccagaatggcgatcagtccggcgacataaaaggtaatttccatgtattttctccccttatggcagcagacttttcacatcaatcggcttggcttcattgtcggcttcgcctttggctttgcccgcaaccgccatcccggttttgtgatagaagttatagtcaggatatttacccggaccggagattaataaatcttctttttcatacaccagatcctgacgtttaaactcacccagctcgaaatccggcgtcagctggattgcggtggtcgggcaggcttcttcgcataatccgcagaaaatgcagcgtgagaagttgatgcggaaaaattccggataccagcggccgtcctcatgttctgctttctgcagagagatacagccgaccggacatactgcggcgcacaggttacaggcgacacagcgctcctcaccgtccgggtcgcgcgtcagcacaatccggccgcggtagcgcggcggcaggtaaaccggctcttccgggtacatctgggtttcgcgtttatggaaggcatgaagccctatcatccaaatactgcgtacctgggtggcgaaaccaaccactaactctttcaatgtcatggttcaatcaccccttattgagctatcaggatcacggctgctgtcaccagcaggtttatcagtgtcagcggcagacacactttccagccgaatgacatcacctggtcataacgcggtcgcggcagcgacgcacggatcaggataaacatcatcataaagaaagcggttttcagcgcgaaccagacaaacggcggcaggaatggtccgtgccagcccccgaagaacagcgtcacaatcagggcggaaactgtcacgataccgatatattccccgacgaagaacagaccgaacttcatccccgaatattcaatgtgataaccgtccgccagttcctgctcagcttccggctggtcaaacgggtgacggtgacacactgccacgcccgcaatcgcaaaggtgataaagccgaaaatctgcggaatgacgttccagactgtgctctgcgagttgacgatatccagcaggttaaacgaccctgcctgcgccaccacacccagaactgagagtccgaggaacacttcataactgaccgtctgcgccgaggcacgcattgcaccgagcagtgagtatttgttgttactcgaccagcccgcgaacagaacagcatataccgccagtcccgccagcatcaggaagaacaggatcccgatattgagatccgccaccacccagtcagggctgaccggtacaatcgcaaaggccagcagcagcgaggtgaatgccaccatcggcgccagggtgaagataaagcggtcagcgaatttcggtgtccagtcctctttaaagaacattttgatcatgtccgcgaccagctggagcgacccgccccagcccacacggttcggcccgtaacggttctggaacagccccagcaggcggcgttcaccgaaactcataaaggcaccgcaggtcacaaccaccagcaggatcacaacggctttgagaacattaatcagcacatcgattaattcaggtgtaaaccagctgctcattgtgccacctcctgcagattaaccgccgcacccgccagtaccggtgaaatatccggcatacccagcggcagaccgatttgcccggctgtcagctgtgtgctgatacgcaccggcagtgtcagtgcgccgtcagtcagctgtaccgacagaatctgaccttccgccacattcagctgctgtgcatcctgtgcatttaacatcacatagctgtccgtcatacgttcctgaatcaccggtgcccgctgtgataattcctcactgccgaacaggtgataatacggcgcaaccgtccagacattctgctgcggcgcaaatgccgccgggatggtgctgaagtaatccataccgccgtctttttcgctgaacagacgcacccccggatcaccgaaacgcagatgaccgcccacttccgcctggaatttgttccatgcctgcggtgagttccagcccggcgcccaggcaaacggaatttgctgacgcggtgctgtcgggctgttgttcccttccatcgagaaggcaaacgccgtgtctttgtcctgcggctgacgctgctcgtgcacactgacattcgccagcattgcggtacgcccgctgtagcggtgcggctcacgggccagtttctgtccgcggatacggaatgcggcatccggcgcggcatctttgataccggccaggtgcggcatctgttcaatgcaggcatcaatcacatgatccagctgtgaccagtcacgggtgttttcattgaggtcattgtacagggcagtcagccagcgccagctttcatgcataatgatggatttatcgtagaaggatggctcatagacctggaagaagcgctgtgcgcggccttcgtggttgatgagtgtaccgtcactttccgcaaaactgctggcggagaggataagtgatgctttatccatgatgtcagtgcgctggtgatccagcacaatcacatttgctgcggcatccagcgcacggtcaacggcggctttatccgcatggcggtaaaggtcgttttccatcaccaccacggtgtccgcactgccgtctgcgagcagagccagtgctttatccagtggctgcgcttctgtcatggcggcaccaaagctgttggcttccgcgccgacaaaggtcagcccggcgtcaatgcctttatctttcagtgcccaggccacgtttgccgccgcctgaatcagtgcatcactgcccgggttgctgccgctgataatcagcggttttttcgcaccgttcagcgcctgtgcaatcatttctgcctgtgctttcacatcagcaggtaaatccgccacagccggcgcggtgttatcaatgatattagcgacggcaaagcccagacgcgcctggtcatccaccggagcgttgtagtgcagcgccgccacatctgccagacgggtggtatccaccgctgtgacaaacagcgggtatttcgcacgctggccgatattctggatagcggcaatctgccagtccgccactttctgtgcggcggccatttcacgggctttgcccttcacagcctgacggacagagagtgccacgcgggcagcggtctgggtcagatcttcacccagcaccagcacggcatcatagttttccatctcacgcagtgacggggtgtagataccgccctgctgtaagatttccagcatcatttccagacggtgctgttcaccggctgacaggccgctgaagaagttttccgccccgaccagttcacgcagtgcaaagttgctttccacactggcacgcggcgaaccgataccgatggtgcgtttcgcgtgatacagcatatctgctgcggcacgttccgcctgctccgcattgatggtgagccagtcatcaccacggcgctgctgcggctgacgcggacggtcatcacggttgacataaccgtaaccaaagcggcctttgtcgcagaggaagtagtggttgatggtaccgttataacggttttcgatacggcgcagttcgccgtaacgctcacccgggctgatgttacagccgacgctgcactgctggcagacgctcggtgcaaactgcatatcccatttgcggttataacgttcagagtgggttttgtcggtaaagaccccggtcggacaaatttccaccaggttaccggagaattcactttccagcgtgccgctttccggacgcccgaagtacacgttgtcgtgtgcaccgtaaaccccgaaatccgtaccgtccgcataatctttgtagtaacggacacaacggtaacaggcgatacagcggttcatttcatgtgcaacaaacggccccagctcctgattctgatgggtacgttttgtgaagcggtatttgcgcactgaatgcccggtcatgacggtcatatcctgaagatggcagttaccgccctcctcacagacaggacaatcgtgcgggtggttggtcatcagccactccaccacactttcccggaactttttggcttcttcatcatcaatcgagataaaggtaccgtcctgtgccggtgtcatacatgacattaccagacgaccacgggtgtcatcggcattctgatattgctttaccgcacactggcggcaagcgccgacgcttcccagcgccggatgccagcaaaaatacggaatatcaagtccgagcgaaagacaggcatgcagcaggttatccgcgccgtcgacttcatattctttgccgtctacatgtattgtagccatagtcagcatgcttccaaaaggcctgctatgcaggcgttaaacgaaaatccgtaagggatcaccagcgctgcttcagcaggttcggctggatcccggcaatggtctgcacgttgccgtaaaccggctgtacgatccccgcttcaaactcatcacggaaatatttgatcgcactctgtaacggctctaccgcgcccggcgcgtgtgcgcagaaggttttacccggtcccaggaaacgacataattgctctaatgtctcaatgtctcccggctggccttcccctttttctattgcgcgcagaattttcacgctccacggcaatccgtcacggcacggtgtacaccagccacaggattcgcgggcaaaaaattcttcgaggttacgggtcagtgacaccatgttgatttcattatccaccgccatcgccagcgccgttcccagacggctgcccgctttgccgatatgctcaaaatccatcggtaaatcaaggtgatcctgggtcaggaagtcggttcccgcaccgcccggctgccaggcttttaaagtcagtccgtcgcgcatgcccccggcgtaatcctcgaggatttcacgggcggtggtgccgaacggcagttcccagacacccggatttttcacgcggccggaaaagcccatcagtttggtaccggcatcggtgcttttgccttcactcagaccgatataccactctttgccgtgtgccagaatcgccggtacgttacacagggtttcgacgttgttgacacaggtcggttttccccataccccggaactggccgggaacggcggtttggagcgcggattggcgcggcggccttccagggagttaatcagcgcagtttcttccccgcagatataacgcccggcaccggtgtgcacaaacagttcgaaatcaaacccgctgccgaggatatttttccccagcagaccggcggctttcgcttcttcaatggcgtgacgcaggtgtttcgctgcctcaatgtactcgccgcgcaggaaaatatagccccggtatgctttcagggcgaaggcgctgatcagcatcccttccaccagcaggtgcggcagttgttccatcaggagccggtctttgtaagtacccggttccatttcatcggcgttacacagcaggtaacggatattcatgctctcgtctttcggcatcaggctccacttcagacccgtggagaaccccgcaccgccgcggcccttcagacccgcgtctttgacaagatttgtgatctcatccggtgccatgcctttcagggcgcgttccgcccccgcataaccgtttttgctgcggtattcatccagccacaccggctgatggtcgtcgcgcaaccgccaggtgagaggatgcgtttccgcagtacggcaaaccgttttcactgtcatggatactgctccagtaacgtttcaatggcttcaggcgtaacgtgactgtgggtatcttcatcaaccatcatggtcggccctttgtcacagtttccgaggcagcaggtcggcagcagcgtaaagcggccgtcggcggttgtctgtcccggctgaatattcagtttgcgctcgagtgcggccttgatcccctggtaaccggtgatgtggcacaccacgctgtcacagtaacggatcacatggcggccgaccggctggcggtagatctggctgtagaatgtcgccacaccttccacgtcactcgccgggatgcccagcacatcgctgatggcgtaaatcgcgccgtcttccacccagccacgatgcttctgcacaattttcagtgcttcgatggaggcggcacgcggatcttcgtaatggtgtttttccgcttcgatttcggcgcgctcttcgtcactcagcacaaaatcaggttgttttccggctggctgcgccgcattcactgcgccttgcagtgctttttttgcttcagggttcagttcttgcataatcagcgatccacatccgacataacgaaatcgatacttccgaggtacacaatcaggtcagagaccaggctgccgctgatcaccgacgggatctgctgcagatgggcataacttggtgtacggattcgggtacggtaactcatggtgctgccgtcactggtcaggtagtaactgttaatccctttcgtggcctcaatcatctggaaagattcctgagccggcatcaccggaccccatgacacctggaggaagtggttaatcatggtttcaatgtgctgtaacgtgcgctctttcggcggcggcgtggtcagcgggtgatccgctttgaacggcccttccggcatgtttttcagacactgttccagaatgcgcagactctggcgcacttcttccactttcagcatcacgcggtcgtaacagtcgccgttggcggcaacaggcacttcaaaatcgaaattctcatagccggaatacggacgccatttacgcacgtcgaaatcgatcccggtggcacgcagaccggcaccggtcacaccccagtcgagagcttctttcgcgttgtaagcggccacaccgacggaacggcctttgaggatggagtttttcagtgcggcagtaacataggattccagacgtttcggcatccagtcgaggaaatcacgcagcaggcgatcccagcctttcggcagatcgtgcgccacgccgccgatacggaaccaggccggatgcatacggaaaccggtaatggcttccaccacatcataaattttctggcgatcggtaaaggcaaagaagaccggcgtcatcgccccggtatcctgaataaacgtactgatatacagcaggtgactgttaatgcggaacagttctgacagcatcacgcggatcacatccacacgcgccggaacctcaatacccgccagtttttccaccgccagcacgtacggcatttcgttaacgcagccgccgaggtattcgatacggtcagtgtacggaatgtagctgtgccaggactggcgctcgcccattttttccgcaccacggtggtggtagccgatatccggcacacagtcgacaatctcttcaccgtcgagctgaaggatgatacggaaagcaccgtgagaagacgggtggttcggaccgaggttcaggaacataaagtcctcgttctcgttgccgcgcttcataccccactcttccggtttgaaggtcagcgcctccatttccagatcttctttctgtttggtcaggacaaacggatcaaattccgttgcccgcgccggataatctttacgcagcggatgcccttcccaggtcggcggcatcataatacggcgcagattcgggtgtccgtcgataatgataccgaacatttcccaggtttcgcgctcataccagtttgcgttagggaatgcggaaatcaccgtcggcacatgcaggtcgttttcactcagcgccactttgagcatgatatcgcggttacgctcaatggaaatcaggtgataaaacacggaatagtccgccgcaggcagaccttcacggtgggtgcgctggcgctcatccgtaccgtgcagatcgaacagcatcacatacggtttcggcagcgacttaaggtaaaacatcacttccagaagctgctcacgcttcacccagacgaccggcatcccggtacgtgtcggctgaaccgtaaatgcgtcaggaccgaacttacggcgcagctcctcaattaccggatcatccaggtaatcgtgagtctgccacgcgggacgctgtgcggtctgcgtattactttctgtcatcattcttcaccacaacagttgttcagggttcaatggacgcaacacattgcaaatattgcgcccggtggcccgaaagccttaaatttcgtccggggagcgcaggttggtcactgcaatccgttcaccgcgttttcgttctttttctgactgcatattggcgcggtaaacgccctgatcacccaccacccacgacagcgggcggcgctcttttccgatagattcctgtaacagcatcagcgcctgcatataggcttcaggacgcggcgggcagcccgggatatacacatccaccggaatgaatttatccacaccctgcacgacggagtaaatgtcatacataccgccggagttggcacaggagcccatggagataacccatttcggttccagcatctggtcatacaggcgctgaataaccggggccattttggtaaagcaggttccggccacaaccataaagtccgcctgacgcggggaggcacgcagcacttccgcaccgaaacgggcaacgtcgtgcaccgccgtaaaggaggtcaccatctctacataacagcaggaaagaccgaagttatatggccacagggagtttttacggccccagttaaccatatcgtgtaatgcatgttcgagtttccccatatacacgctgcggtgaacgtgctgctcaagcgggtcactgacaacctcttgtttttgcaggggataacggtcattctcaccgtttggatcgatgcgggtgagcgtataatccatcttgtgcctcactattgactacggttgattgttattgattttgttcacaacgctcgggtgtttcacctcgcggcgtgaacgtgcaggtgtccagtccagcgcgccgatacgtgccagatagaaaagacctgccaataacaccagaataaagatcgcggcttcggtgaaccctatccagcccgattctctgaccgaaacagaccaggcgaaaaggtataaggcttcaacatcgaaaatcacgaaaaacatggcaaccaggtagaactttgcagacatccgcaggcgtgcgctgccgaccgagtcaatacctgattcgtaagggagatgtttggcgcgtgcttttgcacggcccccgagataacgggcgcccagcaacataaatgcacataacccgagagcacctaaaagatagatggcaaatgcccagttatgggccagaacttcagtggctgttgacatactcattgcttactcattaaaggtggtgttgcctgccgtacctgcatacagcaccacagcgacacacgagaggaacaactcagtggcggatacaacacttatcgtgatgagaaagccagtaacccggattgttccccgctcttcccaattttgttacaaaccgtcaacttaagattaacccgttgtgcgactttatcgctaaaacgtgtcagtaagtaactaaattgaaaattaactttattatattaacggatacatcgcttttactaacccattatctcaggaaaaacctgtctttccatcggtaaacaggggcaatatttttgatctcaatcacagtttggccgaaaattatttaacaaatgattaattcataaccatttcttaaaacctgagaaaacaggtcaggtttttaacaaagttttattgcaatgtaatgagcactgttaattttggcaatcacagaacatgcgttttgttaacattgtaacaaacaagtaaacaaaactgcgatgcggcgcttaaaacggcatcaaaaacctgaacacggcgtgatgctgttaacatttatatgatatttccgcgcaagggagagaggatacaaaaaagccgggagaaatgatcccccggctgtgtgtctgactgtcacaaattatgtcggtcaggcgtcagattatgacagcgttactccgctgttttatcatcgtctgccggtgtgacagtatacggtgtcttcttgttttcaatggcctgatagaccgtcagcactgactcgctctgctcgtcactgttgcggtataaccagtactgaatttccggcagacgcggcagcccttcgctgacgctcagaatacgcaggtcggcattctgcatttccagcggacgggctgtgatcccgacttcggcattcactgccgcacggacagcagaaagtgatgctgcctcgtaagcaatccgccactgcacccctgcctcatccagggtttcagccgcgagatgacggaacgggttagtttcgtccatcaccaccagcggaatcggctcattcggctgtaactggaaatccggcgcacagtgccacagcaccggcgcggtacgcagagcagtacgcgggtgatgggcaatacgcgcggtggtcagcgccaggtcaatttcgtggttatccagcataccttcaatgtactggctgcgtttgatgcggacatcaaccgccatacgcgggtataccgatgcaatacggttgagtaagaaaggcagcagtgagtcaacggaatcatcggatgcaccgatgcgtaactccccttctgcgtcgttataagccagtgatgcggtggcatcatcatttgcccgcaggatctgacgggcgtaacctaacagttgtaacccatggtcggtcagtaatttgttacgaccatgacgcgcaaacagttcgcgcccgacaagctgctcgagacgctgcatttgctgactgacggcagactgggtgcggcatactgccgcagctgccgctgcgaaggtgttcagatccgcgactgccacgaacgtccgcagcagatcgagatccaggtttaacactggacggtttgaatttatcattgttttttcttcactaattttgatttttaataactacctggtgtttattggcgtgaaaaattgcttcgccaactaagacattaccctatacatcagggtagagtaaaacataactaacactaacaaaaatacgtaactgtgagtaactccattatgtaatgctgcatactaaaacagcaggccgcctgtacaaacacacaaatttttcgtatcttacaacactgttttccgaatattacgaaataagacaatttgtaactgacgaaaatgcatgctgccaataagccttgctgcaatataaacccgattattctgcaactttaaggtcaaatactctgaaaaccacattatgccgtaaaatcctattagttatactactaataattaccagcatcaggggttaatatataagaaaagattatacaatttcaacaactgctgactatttagtaaaaacactgtattactttaccaattatgatcttccgatagataactttacaaaactcagcacaccctcctcctaccagttataagctctgaattaatcacaataccaggcatgatactccgccatatcaataattaaccggcactcccgatcctttccaaaacaaatcctgttgtttttaaccaaaagacgtttactgtcttcaaaaccccgtacggtaagagtagagtgggttataacgggttttacctgataaaatataagattaacgcgctaaggtcctgaacagatgaatataataaagaaatccagcaaactcgataatgtctgttacgacattcgcgggccggtgctcaaagaggctaaacgtctcgaagaggaaggccagaaagttctcaaactgaatatcggtaacccggcgccgtttggttttgatgccccggacgaaattctggttgatgttatccgtaatttaccaagctcccagggttacagcgattcaaaaggcctctattccgcccgtaaagccattgtccagttctaccaggaacgcggcatgcgcgatatgacggtggaagatgtctatatcggtaacggggtttctgaactgattgtgcagtccatgcaggcgctgctgaataacggtgatgaaatgctggtaccggcaccggattacccgttatggaccggtgcggtctccctctccggcggtactgccgtccactatatgtgcgacgaagaacagggctggatgccggacattgaggacatcaaaaagaaaatcaccccgcgcacccgcggtattgtggtgattaacccgaacaacccgaccggggctgtttacagcaaagatttgttacaggagattgtcgaactcgcccgtcagaatgacctgatcatttttgctgacgaaatctacgacaaaattctgtatgacgatgccgtccaccactctatcgccgcgatggcgccggatctgctgaccgtcactttcaacggcctgtcaaaaacctaccgtatcgccggtttccgccagggctggatggtcctgaacgggccgaagaaacacgccaaagggtatattgaagggctggaaatgctcgcgtccatgcgtctgtgtgccaacgtgccgatgcagcatgctatccagaccgcaatcggcgggtaccagagcatcaatgagtttattcatccgggcggccgcctgtatgaacagcgcaacaaagcctgggaactgattaaccagataccgggctgctcctgtgtcaaaccgatgggcgcactctatatgttcccgaaatttgatgccaagcgctttaatattcacgatgaccagaagatgatcctcgacctgctgttacaggaaaaagtactgctggtacagggtactgcctttaactggccggaaccgaaccacttccgtatcgtgacactgccgcgtgaggatgacctggagatggcgattaaccgcttcgggcgtttcctctctcactaccgtcagtaatcgtttctgctgtcagcggcttcccccgggaagccgtttttatttacatcccgcccggaacaccgcagaatatccgctcttgttatcaacagattgctgccaggaatgttgtctatgagttacttttttgcccacctttcccgtctgaaactgatcacccgctggccgctgatgcgcaatgtgattcaggaaaacgtctctgaacacagccttcaggtggcgtttgtggcacatgcactggccgtgattaaaaaccgcaaattcggcggcacactcaatccggaaaaaattgccctgctggcgatgtaccatgatgcgagtgaagtgattaccggcgacctgccgacacctatcaagtattacaatccgcagatagctcatgagtacaaaaaaattgagcgcatggcgcaaaagaaactgattgccatgatccctgaagagttacaggcggattttgctccgctgattgatgaagacgcgcattcaccggaagatgcggcaatcgtcaaacaggccgatgccctgtgtgcttatctcaagtgtctggaagagataggtgcgggtaataccgagtttcatctggcgaaagcgcggctggaaaaaaccctcgaagaacgccgcagcccggaaatggactatttccgcgacgtgtttattccgggattcagtctgtcactggatgaaatcagccagtaaccgggcaactgcgttttcatcagggcacgccgtcagaacggaaaaagtagcgggatcaccgcgatactgatcgccataaccaccagcgtaaacggcacgccgattttgacgaaatccccgaaggtgtaattccccggcccgagcaccagcgtgtttaccggggaggaaaccggtgtcataaaggcagcggatgccgccacacccaccaccatcgcaaacggcagcggcgaaacctgcatttcatgcgctgcctggatagcaatcggcgccatcagaaccgctgtcgcggtattcgagataaacagccctatagtcgcacacagcacaaacagggcggtcagcatcacatgcgggcccagatcaccggccacgtccatcagcccgctgacaatcagcgtgataccaccggttttctgtaatgccagcgcaaacggcatcatcccgacaatcagaatgatgctcggccagtggattgaccggtaagcactttccatatcgatacagcggaatttccccatcagcagacaggcaatcagtgccgcgataaaattcgggatttcattggtgaccatcatcgccaccatcagtgccagacaaaacagcgcatgcggtgcctgggatgcggccggtaccaccgcctccgcttccgccgccaggttgagcacaataaagtgacgccgtttggtggccagcacacggataattttccagtccccgaccaccagcaggatatccccgagctgcagcggctcatccacaatgttgccgtcaagggcggccccgccccggcgcagacccagcacattcagcccgtaacgggtgcgaaaaccgatatcccgcaggcttttgccgataagctcactttccgggttcagggagacttccgccatgcccacgttgcgggagtgttcggaaaaatattcgccgcgcaggatcatcggctccagcatctgctcagcacaaaattcgcgtaaatccatatcactggctgacatatcaatcagcagcacatcacggtcacgcagctccataccaccggtcgcgccgaccatcacccgccggaaacgccgccagcgctcaatccctaccacattcgcgccgtagcgggtacgcagatgcagttcatccagcgtttttccgatcagcggtgagccattacgcacagcaagacgccgcgcacggccgctcagtttgtagtcacggataagatcacgaaaggtacgccgtacattgtcccctgctttctccggctgtttgct

SEQ ID NO: 87 - DNA, 2730 bp, unknown
  Altogen 322075 strain
tctagctattttttctaattttttgtcaaaatacttctccatacaccgataggcatttaaaaacccgtaatgggctttggcttcagaatcgtccactcccgaatacggcaccggccggtaggaggcatcggtcaccaggtcccgttttccggccgttccccgccaggcagcaataatctgagtgttgttctccacaaaaaacatctgggtgtcgtgctcgaaaaatgccttgttttctgattgtgaactgtccaggaataccgccggataatagcgctcacggaacggaacatctgtcgcaatgccataaaaccgcctttggtcctcatatgacggaatatcagacaggtcaaagcaggtattatagaaaaaggaggttaccgtatttttgatatccagggatggtcgcatatcagtacctgcctcatccgggtccagcataatttcatcctgataagccatcagtgccagaaacgccagattgtgggcattcaccagatcatacatcgttgtatgattcagaattagtgaccaggctctgaacgggcagatttcaataatatggcggcggttaaagtctttacctgaaaaacgtattcccggaaaatcggtctcgcttttaaagtgataacggggtaaaccgaaggcttctttgttccagttttcaatatccggcgcccggtcacataactcaccgataaccgcataacggtaaccgtggttattccgtgcagcgagtttttttacatccgaatgctcagccccgcgcccttcacgcagtggccggttttccatctcatccgtcagtttctgtgcatccgtttttaatatcacggatgtcagcggcagactttcttcccgtatcaacccgtccggaccggatattcctgtacgtgtttctccgcctgaaacagctaaggtataggggatcccggcaaccggacgattcagctcatcaaccagaacgatttcaatccatgccttacgggcattacaatttgtacaatactgatcattatgttgtacggatcctgtattttcagattgcattgactgtccctgaataattttccataagattattgtttttcagataccggataaacatatcatttttcagccagacgacatccacaaggtcattctcatagtcatccatacagctgttaatcagagaaaaaagacgtcccggcggttcatcaagtgttaacgccaactccggatattcttcccagaaggtaatctgaaaattatctgccacattcctgcgggcctgctcagaccggttccatgcctgcgtcagatgtacgcccggttcaaatcgtgacggcacagtggaataaccggtggatggcaggcggttaacgaccctgtccccctgtgaggacggaatacagcaatcagccagcggcctcagcagagatgaccagtccgccggtttacaggccggaatcagtacagctgctactctgggatcaaacagacgcaaaacccgctcttccccttcaaacgttatcaactgatacttttgccagtgtgctatctgattttcccagctatcctcactgtgataagcccatccccagctgtcatcggaaaacggcccggtatcgaggatttcagccataccggagaacgcctgccattttgcccttacaagccagggacctgccgtgcccagatgagataacggcgttcccgcatacagcggaatggcctcatcaatccagttatgatgataaaaaagagcggtcgggtcagagtgcgccagcctgttaagtaaaaaatatacgtcaccttgtctgacattagctatccacgtacgccaggtcgtcgccatcactcttcctccgccggtttaatcagcatgctgccggaatgctgcgccgccaccgcacagtattttttcaccggatacggttccggggcgggtggtaccccctccggcggcatcagtctgaccgggacgccgttgcccgggccgctgtcaccgatattcaggttaccggaggtaaaaatagcaccgggcgtgatgcggacaaaactgtcgccgactttgagagtgatctccgttccggcttcgatgataattttaccgtcactgaggtgatgggtctgctgcccgctctcggtcaccaggtttttatccgcacgggtgtgttgctcccctttgatatgcagcgagacatccccgctggtctggtgtttctgcgagcctttgatgatcacatgctcatcaccggtcagttcggtgtgactgttgttatcaatccgccgctttaaatcatgctgtatatgccaggtggcatcgtgttcgatatgagtattcatgtctttctgggcatgaatataaatttcttcttccccggctgaatcctcaaaacgcagctcgttaaatccctcacctttatgagtccgcgtgcggaaggtagtgcgggttttctctttcggcagattcagcggcggattattgcgtccgttataggtacagccggtaataatcggtctgtctatgtcaccgctgagatacgagacaatcacttcctgaccgatacgcgggatcgacataaagccaaagccgtctccgttccagccgtgtgccacccgcacccagcaggaagcactgtgatcagggttgccgtagcgatcccagtggaaatagactttcaccgcgccctgctcgttggtataaatttcttcgccctcagggccgaccacagttgccagctc

SEQ ID NO: 88 - DNA, 360 bp, unknown
  Altogen 322075 strain
ctgtgtaccggggataaactgaacggtattactaaatttggtcccctctccgccgccgttatccgccaatggctggatgccgtgatggttcacagtaataacctgccacgactgattcatcgcatccgacggatggtttttcagggtgaagattttacccggcatcagggcaaagcagttagtgcctgcggtgccggtttgacgctggttctgtgactgctcataacgcagttgcgtgaacggtttaccggtctcatcgtcgcggtagcggccatagctttcatacaccgggtgctgtttatgcacatcaccggtaacttcatgctggaacggataagacgggcgatccgggttgtaatc

SEQ ID NO: 89 - DNA, 396 bp, unknown
  Altogen 322075 strain
gtaggtcagattgatgccggcggtcatgccgaggtggttgtcgctgtaaaacagtttcggaccttcctcgaaccagaagttaattccttcctcaaaggccagacggcaccagaaatcataggcggattcgcgcttctgggtgatgtaatcccgcttttgatgcagttcgtcctgataaaagttcagctcatttttgacatgcgcttcatccagcagtgttgcgagaacctccggcacggattgtttctgaaagatacggctgtcctgattgagggtcatgatccacatttccgggcggatcagaaagtgataccaggttttgttaccgtcggtattgccctgttcggcagaggccagcaatccctgcacggtgcggactttaacgccgtcacgggt

SEQ ID NO: 90 - DNA, 8245 bp, unknown
  Altogen 322075 strain
aaatacgaagtcacagcaaccaagaaggacggtacgacatatcacggactgacaacaatgaaagagccccgcattactaacggactgattggtatttctggtctggatggctcatggacatatagcgcaccggatgaaataagcgacatcagatacattccggtggttgaggaaaagagcaagaaataattatggcactcacagataaacaggaaatgttttgtcgtgagtacctcgtagatttgaacgccacacaggcggctattcgtgcggggtacagtgataaaactgcgcgaagtgtcgggaatgaaaacctgacaaaacctgacatcgaaaaacggattcaggaattaatgagcagccgcagtgagcaacttaaggttgatgctgaatatgtgctgaagcgcctggttgaaatagaccagatggatgttctcgacattatgaccgatgacatgagcataaggccggtctccgactggcctgcatcatggcggcgctacctgagcggcttcgaccttgctgatatgtttgaaggacgtggtgaaaatcgggaaatgatcggcatcctgaagaaaataaaatggcctgacaaggtcaagaaccttgaattgctcggtaagcacatatctgtccaggcattccgggaccagattaaaagcgagcatgatgttgtcggcactctctctgacctgatggacgaactatcgggcaaataatatgaagccagagcatttagcgttactgcgtaataagcaatggcgtctgaataatctgtactggatcaccgataaagaaggtcatccggttcgcttcaaaatgacgcctgagcaaacagaatatttcgaaggcatccacaaccgcaatatcattctgaaagcccgtcagcttggattcacgactgaggtctgcattatccagcttgacgcggccatatttgaatcagctaagtgcgcactgatagcgcacaccctgccggatgcaaaacgcctgttccgggagaaaatcaaatacgcctacgagcgcctgccggacgaaatcaaagcagccaatcccgcgagtaatgactccgccggtgaactggtgttcagcaaaggcggctcggtgactgtgtccgtgtcgtttcgtggcggtacgctgcgctacctgcacgtatcggagttcgggaagatatgcgccaagcagccagagaaagcccgtgagattgtcacaggggcgtttgaggcggtatcaacggaatgcttcacgacgattgagagcacggcagagggtcgggccggttatttcttcgattattgccaactggctgaaaaagcactgatgcagggcaaaacattatctccactggactggaagtttttctttttctcttggtggaagaatccgcagtacgcaatcgaccctgttgagcagttaccgcaacgcctgactgactattttgatgagctatcaggcaaatatggaatcacgctcaacgaccggcagaaagcctggtactacgccaaagaaaaaacactcggcgacgatatgaagagggaatacccgtcgataccgtcagaggcatttcagcagtctgtggatggtgcgtattacgccaagcaattccgctggctgtacgagaataaacgcattggcgaaatccctgataactcacacctgccggtgcatacttactgggatatcggtgtgggtgactcaacgtcaatctggtttgtgcgtgaagtcggtgaagaatttcacatcatcgatcactactcaaacagtggcgaaggtctgcggcactacatgaaagtactgaaagacaaaggctatgaatatgccagccacaacgggccgcatgatatcgacaaccgcgagttcggttcagacgcgaaatcacgccgggaactggcgcaggaagggtacgaaattgacgggcaaacctactccatccgctttgaggtggtgccgaagctatccgttgatgagggtattgaggcagtgcgcgaaaacctgccgctctgtgtattcgatgagaacaagtgtggcgaaggcattacccaccttgaggcgtaccggaaagaatgggatgacaaacgcgggtgctggaaagataaaccacttcacgactacacatcacacgatgctgacggattccgttattttgcggtcagtcgccgcaacgtcaaacgtctgacaaagtctctgacattcaactggaactgacatgaatacaaacgtggattacaaacatcctgcatacaccgaatttttaccggaatggaatatgatcggggactgcgttgacggtgagcgcgtagtgaaaagccgcggtgaaaagtacctgccgcaccccgcagataaaaagcgggatgacgatgatggtgagcgatacaaaaaatatcttctccgtgcttcgtttctgaatgcaaccggacgaacattaagcggattactcggtattgcattcagtaagccggtaaaaatcagtatatcgggtggaacaaagagtcttgaagctgatattgatggtcaggggcaaccattgactcagatgatccgcgatgcattgtctcaggtattgcagcgtggccgtgccggactgctcagtgatttcagtggggcaggtatccagactgaggcagacaaaggcagaccatacgtccggttgtttacggcgaaggagattatcaactggcgggtcaccggcgggaaaacatcactagttgttgtgaaatatcaggaaccggttgagtctgatgattttgaactgcaaatgcaggaccgctggattgagttacgtctgatcgacgggttggcacactcaaggcggtggcagaaggacagtgaaatcagctctggcgagtggataaaattcactgatgcgcagggaaagccgctttctgagttgccatggtcgtggattgggtcaaaaaacaatgaccatactcctgatgcgccaccactggctgacatagcttatatgaatataaagcattaccagattgaggcagatattgcagagtcagcacacactatcggtcagccgatggttgcgctgtcaggcctgacagatgactgggtgaaaaaccacatgtcaggcgggttcacagtcggttcccgcaaaggagtgttgttgcctcagggtggcgatatgaagtttgcacagccggaagaacgcaccatgcagattattgtggcagagcgccgggaaaagcagatggcaatgctgggagcaaagctggttgagcgaggctcatcggcgagaacagcaacacaggcactggatgaagcacagacggataactctattttatcgttgagcgccggtaatgttgagcaggcttttaatcgtgcgctggctttctgtattcagtttgccggagctggagaagcttctgttgaactcaataagacatacgagattgcgcagtttgattcggcagcaattactgcacttctggcatctgtgcagtccggcaatatgcggattgtagattttatccggtatatgcagggggcgaaccttgttccgcaggatgagaaaccggaggatgtagctgaagagctggggttgatcagaggtacaaatatgctgggagtataaaatatgcggccgggtctcatttttgataatgcactgatgattcagattatgctggaaaggctcaaatcatcaactgctgacacacgtgaactggtgtcagatattcgcgctgctgtagcatctgcattatccggatattccggtagtgtttcctcagtcagcagagcgaaatcaattgcgctggcgctgagaaaaacgctgaagccagttctttccggttattctgacaggttacttgatgacattatcaacgccgctgttgtgatggcagacgctgaatatcacgggtttaactcactggtaaaaaacgttaatccggctgatgctgacaaggtgcgcagagatgtgcaaaacataccgctctctctgacgggatggaacagctccctgtttctcgccaaattcattgagtcgtgggccgatacagccatgcagcagatagagaatcaggtggtgatatcgttgtcgtcaggcgggggtgtggctgacctgcaatcggctattaacggaacctcagcggaaccgctgataatcgcagcggcagtggttggcagggtggtcaggggatttcagactgttgccagaacgacattacaacatgctcacagtgtggcggcgacggatttctataaagagaattctgatctgattaagtatgaggaattcagtgcaatactggataacaaaacatcggcagtgtgccgttctctgtccggccgctgttatccgcttggtaaaggaccgaggcctccgcttcaccctaactgccgtagtcgcttgctcccggtgcttgatgaaaaatatgcagacttgtttgtcacagagccggtcggtaattctgaatggggcgaagaaacttattatgagtggctttaccgccagccagcgaacaggcaggacattgtgcttggtaagaccagggcgcagttattccgtgagggcgggttatcaccggaacgattcgcaaaattacaactcgataaatacttcagaccaataacactgaaggaacttcagaaaatcatacccgatgccttcagaaaggccgatatcgaactcaaatgacccgctccggcgggttttttattacctgtagtcagtgactacaccatcaaaaccagaggttgacgatgtttaagtggaaattaaccaaagaagaatttgacgtgctgactgaagagcataaggccatgtacaaagaagccggtgacggataccaaatccagattgacggcatgcctgacatcccggatgtgtccggtcttcagaagaaagtcgatgaactgttatctgagaagaaatcagaacaggaaaagcgccgtcaggctgaagaagccgcaaagaaagctgcagaagaacaggcccgtaaaaaccgtgatatcgaatcactggaaaagagctgggctgaaaaactcagcacccgcgaaaaagagttactgacacagttacaggaaaaagatgccagcctgcaaaaacttttggttgataacgtcgcgcagtcgctggcgacaaaacttgcgggtgacagtgccgcgctgattgtgccgcatatcaaatcacgccttgccgttgaagatggtaaaacccgcgtggtggacgcaactgggcaactatcagctctgactatcgatgagctagaaaaagaattcagaaataatcagttatttgcgccggtcattatcggcagtaaggcaaccggaaccaggggtgacggaggcaaagacaaatcacctgccggaggcagtgataaacccaaaagtgtgaatccattggtggatcgcgcacgtgaaatcattgcaaaaaatacagaggcataagatttatgacattgcatatttttcagcatcaggtatctctggcagcgacagagctggtggctcaggcagtacagcagtttaatgaagcatccggcggtgcgctggttttcggtgatggtgaccatattggtgattacattgagcagacatcatggcagttacttggtggtctggcacagcgtcgtaatgcatacggatcaggtaatcttacaccgcaggagttagggcaaattctcgaccggatgattaaggtcgatggtcgtatcgggccggtatctgtcactccgacgatgatgaagcgcctgggtaaagacgtatcagaagcggcagcggtggtgtctgctcaggcagcagaagcgatgctgcaggattatctgaacactgcaggtgcggcactgaaagcggcaatctccggcaacgcagcggcagttactgacctgacagcaacaggaagcgcaccatcactgcgcgggctaaacaaaggcacccgcccgtttggtgatgcgtattcccgtattatcgcctggctgatggacggtgcaacgttcaatgactttatggacgaaacactaaccaactccagtaacctgttccagattggtaacgtggccatcaagcaggacggattcgggcgtcgttttgtaatttctgatattccgtctctgtctgaaggtaataagcagcattcactcggtctggttaccggtgcagcggctgtacagacctcaccgctgatcatgaaagcgcaggacgttctcggacaggaaaacattaaggctctgatgcagggggaatatgatttcaccatcggtttgcgtggttatcagtgggcgaaggacagtatcaagtcaccgactaacgaacaggtagccgcaactgataactggaaacaaattgctgcaagcatcaaagacactgccggggttatggtgacattcggtaaagatgctgatgcaggcggtaaggctgctaaatctgcgaagtaatcgcagtaataatccggaggtgatatggcagtacaaatcagtccggagcagataggcgagcaactggaaatgatggggtttgaggctcctgattttgcggttgccgccgcattatctgtagtggacagcattgacggatgccttgataaggcagggtatacggatgcggtgatgacgcttatcaaggtgtattccgtcatcctcatcctgtctgcggctgatgtccgtaaaattgcatcagaacatgcaccgtccggtgcttcagtttcgtaccagtattttgctgacggcagaaaatcgttgctgaaattgttatccgcactggataccgccggatgcacagataacctgcctattgaccggccggtcagcattattcagtttgacgtgaaccgggggtgatatgggtaaaatccttcgccggttctgcaagggatgggcaactatctggaagattgaaggcaaagacagttacggcaagccgaaattttcagagcccattcatatccggtgtgactacggaagcaggatgagtgacggaacaaaaacggtaggcactgaaattgtcatcaaaaatgtcatctggacggaatacagcgaagccacacaagatgattacatcgctatcggcaagcatgacggacaagatccgttcgcggccggagccagcagaatcaaagctgttgaccgtgaccgcgatattaaaggcggcaaagatgactacactctaacaacggcggtgtgacatgggagcaagagtaatcggtattaaccgtgctgttgctgaccttaatgcgctggtcggtaatatcacgtcaaaaaaagtcagcagggccatgcatcgtgcgctggatatcggcggcagacaggctgcggtatacacaccgattgatacaaagacactgatcaactctcagttccgtggtgtggaggtgaaaggaacgctgtttaccgggcgtgtgggttactcagcatcctatgccgttttcgttcacgacccgaatgtgaagcagagcttccgcaggccgacagcgaagaaagaattcctcactaaaggctttgaggaaacacagcagatgattgaccaggctgtcgcggaggagatgcgcatatgaccaccactgagcaggttaagcgttatttttccgagtcagggctgtctgacggttttatcatccaggactatgagtggtcagaatccggcggacatgaccatgatgcgtacatggtttttcagcagcgggacggaaccggaagaatcaatgatcttggtggtgatgattttttcactgtgtcgttaatttctggcaagggctgggttgaattcgtcgctcagagagcctatgcaatacttgattatgtcaggtgccatgctcagtctcatggtcttaatttcatcatcaatacatccgggttcgtgaatccggttcagacggcagaggggaggtattggattcccctgaccttccgctgcacatcctaaacaagcacacttcaaacaggtcgctgatgcggccttttttatttgcaaataaagaggttataacatggcacaatgccctgatgataaaggcctggggatgggtaatgcggggattcttcgcatcgcgcccggctgccccggtacggttcctgaacagtcagcgtttctgcgtctcggcgcactgactagtaaagggctggattacggtactgaaacggttacttccaaagcagacgacacaaaagggctgggcgaagccatcgtgaccggactggatttaaccattaagtttgatggcgagctgaagcgcaaaggtgctgatggttccacgtctgcttttgatatcgccaaagaaatccttgctgaagtcaag

SEQ ID NO: 91 - DNA, 177 bp, unknown
  Altogen 322075 strain
tgtgattcaggggtatatgaacttcacatcatggtcgatggagttccctaccaaagaaatctccacgtactccggtgaactgaaagtcgcagacgctgacagctttgaatggctgcaggaagaaatcgtggttcagagcatcgcagccaaccccgcgacactgactgtgaaagccgg

SEQ ID NO: 92 - DNA, 3036 bp, unknown
  Altogen 322075 strain
aatctcaattttgacgaactggcaaaagcattgggtgatcgggttattgaccgcctgagaatgggttcgccgaccgttatcaatttcacatgggaaagcttccgcaggcaggttaagtagcgtcataacccaggacagaagactttttgaaatgattggagcggccagcgggaatcgaacccgcatcatccgcttggaaggctgaggtaatagccattataagatgaccgcaatggtgggtcgtgggaggctcgaactcccgaccaattgattaagagtcaacggctctaccggctgagctaacgacccgaagaaattaaaatacacccgtaagaaactaacggcaaccgataacctcaggaggttgaatgcaaaaacagacattccttctcaggaatatacagatactcagaaatctcaaggcagagctcgacaatctcccgcttaacgaagaattccccctcgaagtaaaaatatccgatccgaagcgaacccttccccaaaatgacatgtttcatgcgctgtgcggcaatgtagcagagcagggcattgtatgggctggcaatacgtggggattgcaggactggaaatgtattttcgtatccggacatgcaaaggcgacaggccgtgacgggacgcttattccgggacttgagggagagattgtaccgctggcaagagaaagtaccgcaaacatgagtaagaagcgcatgacaagcttaatcgaatattcgcaggcgtgggctataggtgaaggtataaaaccccgcgccgcgcgatacaggtttaatcattacggacatcaggaataggagcaggacgtatgaaagaaccgcacatacaccgacttctcaccaatgacgaagccgataggccggactgcacacggggaactcagcagagttcattaagtggtttaccaacaaaatgctgtatatcggatgtttgcgaaaagtcggcacaaccaggcacaatcgccatgtgagtcagttatttgcaatatcgccggatgctgtcaccagactgtatcgctacatgcgtgaatccagtggtgagttagtgccggttagcgggcatggtgagagaaagctaatcgaattttgcgggaaggtggtcagcaaggcatacattgagccggggttcggtcggtcagatgttacttggttcgactcgctagtgcagggagtcaggagaagaaatggtaaagcccgccggagcgggcgactggtgtcagcggacaactaaaactgaggttttggcataacggacgactgccgcagcagtggagccgagtagataggtagaaatactcggacgacgggagccgatgataatcaggtctgcactaatagcttcggcacgttcaagtattttgtcttttgggcgaccaattacgatatatctgtctgctctgtcctccggcaaactgaatttcctgattatctcgcctaattctttttttgtggaatctatcagtcgcttttccagatccgcgacagacaaaccactttcaaaaccaccatatgggaatgctggtataaccgcaagaaaatggatacgggcatcttcaagtttagcgaggctttcaacatgaggagtaaccatatcagtgagttctttttcccatacatcaatcggaacaaggatatttttgtacatagttcctccgatattcattattcactcagattaataatagaccagattggctaaaaagtgagtaaaaaacgttcagcagttattaatcaatgatcttcggaaaaaactccactttgcacctaaagcatggtgggttcgcgtaattatttattacaggggagggtttgatgaactgcgcaatatgcggcgaaggactggccgacgatgaagtttatgtttgcgaccagtgcgccggtgaatgtccgcatctggaagtagtcgagaagataaaaggagatggtgagagtggcaaagcaaccgcggcgaaaatgcctgatatgccgcgactggtttcacccgaaattcagtaacgaatggtggtgctgtccggagcatggtgctgagttggcaataaagcgacgaaacagggaaagggaaaaggctgaagccaaattaagaaaggagcagcagcaaaaagagcgtgaagcaaaagataaattaaaaatccgcaagttagcagtaaaacctacctcatatttccggcagcaagcacaaacagcgtttaaccaattcatcagactcagagaccgcgatgaaccatgcatcagctgtggtgaacctaatccgcctgatttacatggtgggcagtgggactgcggtcattttctgtctgtcgggtcacatcctgagctgcggtttgaggagcgaaatgcctacaagcaatgtaaatcatgcaatgcgggggccggtaaattctcacacaaaaataacactgtaacgcagaaatacgagttacggctgattgaaaaatttggacaggagttagttgactggttacgcggtccgcatgagataccgcactggaagcgggaagactatatccgtatacgcgatgagtaccgtgcgaaagtgagggtgttaaagcgtgagacctgaaattacaccgatacctgaacactacggtaatcaggcgtcactggcgactgagttgaaaataaaccggtacacagtcaggacgtttcaccgggatacctggtgcgaagcgtacataatctacatcggtgtgcttatgaccgagttcgagatgaaaggcatacaggagtgagaacaatgagagaggaacattggagcaacactactcttcagggcaactatacgggaagcgtcatttctgttttatcggaagatattaaatctcatagcctgcaaaataacgaggtaatgtatgcgtgatattcgccaggtgttagaacggtggggggcttgggttgttgataatcaggaatcagtatattggtcaccaatagctgccgggtttaaagggctgatccctgaaaaagttaagagtcggcaatcatgcagtgatgatgatgctctggtgatatccggcattatggc

SEQ ID NO: 93 - DNA, 24332 bp, unknown
  Altogen 322075 strain
gaaaaagagaatatcagcgcctgatacgcagagtgcggctaattcggcgcaggccgggaagatcgtggttgagaataatgcggtagcggtgccgacaccatttgggccggttctattacctatacctgtcacgccacaggataaagctatgcaggatgaacttgcacaggcgcttttgaaggcaggtaaaaacataaaggaatatttcagttcgtccgcaacggatgaggaaagatatgagactcttattaatgcttataaggcgctgactcctgaagaaaaagcaaagcttgactatgaatttgaacggaatgccctgacagtcgattcagcccccgtttctatagaagaattagccaaacaaaatggatttggtcaggcgtttgtccggggagcaagagaaacaaaggaccaaaatggtaatacggtctatattatggataacggtggtgcggggagccagatccgacgaggtgatattgtcagactctatggtgaacatatttatgtttattccaaagagggtacttttcaggtagcacttaatgctgatggttcgacaaacagtactctgacaaagcagaataagaattttaatataccaacaaacactggaggagatcagttaagcggaactaattccccaggtaaacttgaaaatccggtacctgatcaaagcaagggtacttcactggttgcccctaatccatcagatgataagaaaattacgaatacggggaatgttgatggtcaacgtgatgttggtgggaatattttaattaatccgggccaagaccctttaaagttaaaagatgttgtttacctttctgaaaattcgaatagtaagatagatactgttattggtgagacattgacaggcaggaaaaactttaccagtactacaaccctgacttcagatgaagcacttgctgctggtctgaggtttttaggtaaaggatataaagaaataggtaaacctggttccggtgtttatcatagcgccgatgggacaaaagagtttagaattgactccggttcaataggtggagcacatgctcccggaattccgcatgtgcattttggggtaaagaatcctgaaacagggcgatacatatctaataaccatgttccttataaagattaaggatattaaatgattttaaagcaaggaatcatcaatgacggtgaatatgccggatggaaagttcagatcattgatgatagtcagggggatacaggggggttctatctggtattacagaatgaaaacatagaagcctttgattattggtttgaaaataaacagcacttagataatcaattgatggatttcaacataaaatggatgggaccctgtaaataactctgtggaattgccactgcatcaaaggtgaccgttcagacggtcaccgaacacgataataaaccgtgtcatggccaatcgccagtttctgatcagtatactgtagtggtcaactaaaactggccacaattttagcgtttttccggtatcggttttccgattcgtttggtggtaatccaccgtcatattcatgcggcctgagatcgttgcaatacccgacgatataatcagttattgcatgagcagcttcgctgaagctgatgtagtcagccaccggcactcactcgtttttcagacttctgaagaagtgctccattgtgctgttatcccggcagtttccgtgcctgctaaaaaatacccctgcaggagctaactctatgctggtaaggaaataaatttttatgagaaatgatctttttatgaaaaaaaatgagatatacgtgaaaatgttatctcttgcattgccttatatcaggaatgttcagtcgttaagtgctgaagaaaaaggtagtgatacttcgtgttactttgaggcggaattagtacacaatttgatgcacactttgcttgcatcggatttctcagagcatgatttatggtttttgaataatcaggcaaaattctatttcgaaagatgtagtgaggacatatcgccaaactacattcaacatattgaatatattaaatatttatttggtgttgtcccgactgaactgagagttaaattactatggaatggtccggagtaaaagcaatataaattaaataatatgaattttttttgaaagggcagtgtcgttatttcagaacacctgaataaagcagatttccacataaaacggctctctgtcatgaaagccgttgttatatcgctattccggaaaagatagccggggaatgaatactgtggttttcctccggtgttatcacggctccagcccgacggctttccacgcgctcatcagcacagcagtcacttcctcatcataattctgatcagcaatggtcagggtttcgcgggcgaaggtgaggaaatcacactccggcggcaggttgcctctgcgcagcgtgtcgaaccagatttgtccggccacttcccagctgtacccgccgagggcggaggcaaagtggtaaaatgcatggttcgggatgccggagtagcaatgcacgccgccgttatcattctccgggtcatccggcagctcaatataatccctcatatgcgccacctgtttatctttgccgatcaccggatgattataggcatttcccggtgacgaaagggagcgcagtgctttaattccgctttgtttattaaacaatgttctgccgatatgccagtccccctgatggctggcgtgacggcggtggtaatgacccagcatgacggtaaacacatcacagaccgattcattcagggcaccggactgatggctgtaggtcagcggggaaaggtgatcaatcacagcgtgggaaaactcgtgtgtggcgatatccagctgggcaaaactcagaaacaggggagtgacgctcattccggcatccccggcaccaaacaccagatgtgcgccgttccagaaggcattgcagtagccgcgtccgtaatgtgtcatggcggagatagtggcattgctgtcattaaaggatttgtaatcaaagacatcatcaaaaaaaccgtaaatgatatcaagatactcaaacatattatcggtatctgtatcctgccgcacaggcatatgtgactgtgggttttctgctttccggtcttcgcggtaatacaggtccggaacagtggtcaggtttttcagatgcatcacccggcggtgtgcctgcgaagggcacccggatgccggcagcgcagcataactgagaggcatcatgtctgtttccggcagtcgccggtaaccgagcaaccgctgcatatgctgataacataactgtgtctcttcgtgatccccttcatgaagcaggcgttttttcaggatccagggcggtaaaaatgaatagcgcggggcatgtgctgacataggcggttctcctgtggttggaatgaccatctttacggagaaaaatatttactgcagcagactatcagcctgcttttcagtcagcacactgtgaagggttgtcagacccagtcacggggaataagaaaatcactcagtgcggcttccggagaaccgggctgcggctggtagtcatattcccagcgcaccagcggcggcattgacatcaggatggactcggtccgcccgccgctttgtaaaccgaagagtgtgccgcgatcccacaccagattaaactccacataacggccgcgccggtagagctgaaactggcgctcgcgctcaccataagggatggaacggcgtttttccgcgatcggcagataagcccgggtaaagccgttgccgacagcctgtgtgaaggcaaagcattcctcaaaaccgggtttattcagatcatcaaagaacaggccgccgataccacgcgcttcgttgcggtgtttcagataaaaatagtcgtcacaccattttttataatgcggccaggcatcttcgcccagcggcgtgcagatatcctgtgcgacactgtgccagtgtacggcatcttctgtgaaaggatagaaaggagtcaggtcaaaaccgccgccgaaccaccagaccgggtcacagccggctttttcggcaataaaaaagcgcacgttggcgtgtgcggccgggacatacggattatgcggatgaagtaccagcgaaacgcccatggcctgatagctgcgcccggcgagttccgggcggtgtgccgtggcagacggcggcaggctgtccccgctgacatgtgaaaaattaacaccggcctgttcaaacagtgcgccggatttcagtacccggctgcgtccgccgccgccggactcccgctgccacttatcttcggtaaactcagcaccgccgtcacaggcggcgagttgtccgcagagggaatcctgtaatctgagaaaaaaatctttaacactgtcactatcagggatattcattacatcacgaccattgagctgctgataaactttagtatatcattttgtttttataagatatcacacccgttccgtcacggacacgggcagacaaccggcagacaggtaacggtatggacattcgcacatttcagcaaggcgattttgaagaggttgttgcgctctgggagcgttgtgatctggtcacccccccggatgacccggaaaccgtgattgagcggaaaatggcacatgatccggccctgttcctggtggcggaagtcaacggcgaagtggtgggcacactgctgggcggttatgacggataccggggctatgcctattatctggcagtacatccggaatttcagggacggggaattgctaatgccatggtggcgaggctggagaaaaaactgctggcgcggggatgtccgcagttgctgctgtcgattccggatgataataccgccacgctgagtatgtttgacaagctggcttacgacgagtgtcagcaggacagcctgacctacagcaaacggctgatcaccgacccggaatattaactgcccgggttgaccacactgagtgtatcggcggttaccacaatggcatggcggtctttttccattccgccttcaatgcggatggtatcattaggggtgataatctttttcccccataaatccgccgggatttttacctcgacaataccgctgtaatcccccagcagatagtgttctgccgaaatctgagactgaatattaccttccagaatcacccggctgttatcctgcagatagggcagttgtttgatgataaagcgctgtggtgtttcacattttactgtgctctgatgatactcataggcagaaaatgacggcagagccgcagcaggctgaaaccagaatgtacctgtcagaacaaccgctgaaaacaggtaaaaagtcgatgatgtgaatgtcatttcagccatagcttacgacgccggtaaatgaaaaatgtcggttatataccaggagatatcttatcggaaatgttacgttactgaattggtaaacatacctatttcgttaaaattatttgatgtaataattcagaatgaatgttttgtcaattccggagtctgatatctgaaccgaatgcaaaggagcaatgaatgaagtgttatcaggcaatgaagctggccgccgcggccggtgccgtactgatgctgaacgggtgcagttcgttttcatggtcatcattatcgccggtaagctggttcagcagcagtgcgctgacggtaacggcacagggtgtcggcggtgtgaatagtcagactgccatgaccgaaacggcgatcagtcagggactggacgataaatacacactgcgcggtggtatgcagaccgagcaggggcagatcgttaaaatttttgaaggccggaaagatgataaaacggttatccgtctgtccgggccggaaaatggcactgtgcagcgcattgttgccaatgatgatgatatccgcacggaatgggacaccaaaaccggaaccctcttttcggacatctatccgcaggccgttgccggtgcctgtaccctgaccactgaatttgatgacagtgcacaggttatctgccgttcaccgcaaaccccgcgtgtttcctatgttttccgcggaacctggtttggtcctgaaacactgatgccgtcagatgatattctgaaaaactggacagtcagttatatcgtctgggccaataaataatccggaaaaataaatgaacttgcggaataacaaagtaattccgcgtcagtgatttatgataaggccatttcctgatcagactgacgatgcaaagggagcaatatgtcacaagcacaaagcggtattctgccggaacactgccgtttcggtatttttattgaagcaaacaccaaaggtgatttaccggcgatccggcgcggttgtcaggttttcctggcagcgctgaaaaagttacagacacagtttgcggctgatcatctgagtgccacggtagcattcggtcacgacctgtggcgtcagctgggcagtcagagcagtgcaccggagctgaaaaacttccgtgaactggggcgcggcctggcgccggccacacagtatgatttactgatccacattcattctcagcgtcacgatattaacttctcgctggcacaggcagcggtggcggcatttgcggatgcggttgagattcagggcgaaacccacggcttccgctggacggaagagcgtgacctgagcggttttatcgacggcaccgaaaacccggaaggggatgagcgcccggacgtggcactgatcgcggaaggggaagatgcgggcggcagttatatcctgactcagcgctgggcacacagcctgaataaatggacccgtttttctgaagagcagcaggaaaagatgattggccgcaccaaagcagacagcacagagctggatgaaaatgtgcgcaatgtaacctctcatgtttcccgcgtggtgattgaggaagagggcgaagagctttccattctgcgccagagcctgccgtacggcactgccagcggtgagcacggcctgttctttatcgcgtactgcggtcgtctgcacaatattgagcagcaattgctgagtatgttcggcgaaaccgacggtaaatttgatgatctgctgcggttcagcaaaccgaaaaccggggcttattattatgcgccgtcgctggaacagctgagtgcgctgtaagagggtgtcactttaagcccggaaccggctgataacgggcaaaaacgaaaagtcgctgtgaatacatccctgtaagctcaggcgcgccatccgtggcgcgcatgcttttcgtttcctttgcccgttatcaccgtcatactttccccgcagtgatgcacatttttgtgtctgtttttatccttacaaaaacaaaggttaactgacactattccgctgtaccttcccctgagggcaacctctatcctccgtgtatacacaacacaggaggttcccatgcttgagtttttcagagaaaactggtttctgcttatgctgctgatttgcccgctgatgcacttctttatgcaccggggacacggttcacacggcggttgtgaccataatcagcataacgaaaaagcacctgcgtcacaggaagagaagaaacatatcgatgcataatatcgtgaagtaaataatcactatatataattccataatgatataagtaaatggcttgtgtcactttacggatatatgcacactggccggagttacctgaaacacatcatcataatgaggttctccgccgtgaaactgtctgtcaacgctgtattacctgccggtctgctgctcctttctgctgtatggagcagtgctgccggtgctgctcagttgctgaacagctcctatgatattgcccgtgagctgttcacggaaatcaacccgctgtttgaaaagcagtggaacgcggaacatccggacgatccgctgactatccgccagtctcacggcggctcctcaaaacaggcgctggcgatattacagggactgcgggcggatgtggtcacttataaccaggtgaccgatgtgcaggttctgcatgacaaaggcaatctgctggcagcggactggcaggcgcgtctgccgaataacagttccccgtattattccaccatggctttcctcgtgcgcaaaggcaatccgaagcagatcaaagactgggattccctgctgcgtgatgatgtgaaaattgtttttccgaacccgaaaacctccggtaacggccgttacacctatctggctgcggaaggtttctggcagcagaaaaacggtaaaaacagtgccaaaacacaggaacagatgaaaaaattcctcagcaatgttgcggtatttgataccggcggccggggcgccacgacgtcatttattgatcgcgggctgggcgatgtgctgatcagttttgaatcagaagtgaataatatccgcaatgaatatggtgcggatgattatgatgttatcgtcccggcgtccaatattctggcggaattcccggtggcgcgggtggataaaaacacggaaaagaacggcacgcaggctgttgctgatgcctatctgactttcctgtacagcccggcagcgcaggcaaaaatggcgcagtttaattaccgggtgactgatccggatgtgatggccgccaataaaggccatttcccgccggtgaccttatttaaagtggaagatcagttcggttcatggtctgaagtgatgacaagccggtttaattcaggcggtgaatttgacaccctgatggctcagggacgctgatatggcaaggcgggtgttgccgggattcggcctgtccctcgggtttacgctgctctacagcggactgatcctgctgctgcccctcactgcactggtattacagctggcgcagatgagctgggctcagtactggcagggcattaccggcccgcagggggtcgccgcctataaagtcacactgctcgccgcgcttgctgccagtctgtttaatgcagtgtttggtgtgcttatggcctggatcctgacccgctaccgctttcccggccgccgtattctcgatggcctgatggatttgccctttgcgctgcccacggcggttgcgggactgacactcgccactctctttgccccgaacggctggtacggccgtttttttgattcgtttaatatcaccgtggtgaatacctggattggtattgcggtcgcgatgatgtttaccagtattccgtttgtggtccgcacggttcagccggtgctggaaaccctgaaaccggagtatgaggaagcggcagaaacgctgggtgcttcgcgctttcagatattctgccgtgtgatctggccggaaatcgctccggcagcactggcgggaaccgttttatcctttacccgcagcctcggcgagttcggtgcggttatttttatcgccggtaacctggcgtggcagacggaagtggtgtcattcctgatttttgtccgtttgcaggaatttgaatacccggcggctgcggcgattgcctcggtcgtgctgatgacctcgctaatactgctgctggcggtcaatattatccagagccgcgccggattgcgtaccgggagatctcatggctgatacactgcgccgccggcgtttcccgtggcagaagtggctgctgatttctgccgggttgctgctgacatttttcatcctgattattccgctggtgtggatttttgtgaccgcgctgtctgatggcatcggcggtgtgatccgcgcactggcggaggcggatatgctgcatgctatctggctgacactgatcgtggcgctgatcaccgtgccggtgaatctgattttcggcacactgctggcgtggctggtaacacgatttcgttttcccggccgtcagttattgctgacactggcggatttgccgtttgcagtatcgccggtgatcgccgggctgttgtatctgctgctgtacggctcaaacagctggctggggggctttctcgaaagttcgctggatacccagattatgtttgcgttgccgggaattgtgctggtaacgattttcgtgacctgtccttatgtggtgcgggaactggtgccggtgatgctcagtcagggcgcacaggaagaagaggctgccgtgctgctgggggcccgtgcatggcagatctggtggcgggtgacactgccgaatatccgctggccgctgttttacggcgtgatcctgaccaacgcccgggctatcggggagtttggtgcggtgtcagtggtctccggcgcaattcggggagaaaccttcactttaccgttacaggtggaattattgcatcaggattatcagaccgtggcggcatttaccgcatccggtctgctggcgctgatggctgttgtgaccctgtgcatccgccacggcgtgatggcatatcagggatcccggaggaaatatgagcattgaaatccgtcatctgacacaccatttcggtgcggagccggtattacaggatatctcgctgtcggtggcggacggcgaaatggtggcgttgctggggccgtccggctccgggaaaaccacgctgctgcggattattgccgggctgacccctcatagcgccggagaattgtatatcagcggggaagaagtttccgggctggcggcaggagagcgccgggccgggtttgtttttcagcattacgcgttgttccggcatatgacggtgtttgacaacatagcattcgggctgacggtactgccgcgcaaaacacgtccgtcaaaaaaagaaatccgcactaaagtgatgtcactgctggaaaaaattcagatgccgcacctggcggatcgctatccggcacagctttccggcggacaacaacagcgggtggcactggccagagcgctggcggcagagccgcgtattctgctgctggatgagccgttcggtgccctggatgcaggggtgagaaccgaactgcgccgctggctgcgtcagctgcatcagtcgctgggatttaccgctgtattcgtgacacatgatcaggaagaggcgctggaggtggctgaccgcatcgtggtgatgcgcggcggacatatcgagcaggtcgcggcacctgaaagcctgggaaatgatgacagtaaccgctttgtgacagaatttcttggtcagataaatattttccgtggtgatatcggtacggatggcggggtacggattggcggtgtgcgccagccggttgccgcactgaccgccggttccgggccggtatcggtatttgtgcgcccctggtcgctgacgttacagcacactttttcagcggatgcggttgccgcccgggttgtgaccatccgctcacacgggcattaccgcactgctgtggtgaccacggaagcggctgaagatgaagtgacggtaatattaccgccggacacccgtgccgccgccggagattctgtctggctgacaatcagggaattacggctgtttcgcggcgaagatgaactggcgctgctgccgcaggcacagtgcgcataaagatgaaaataattccggttgcatactgccttgcggcggcggtatggtttccgtttacggctcaggaggcagaacaacgtggcatctatcagtaatgggatcggcaataccccgcttttccggcttgcacggctgggtgggggcagtggcgcagaaatctgggtcaaaccggaaggcaataaccccggcggttcggtaaaagatcgtgcggcgaaaagtatgattgaaggtgccgaacagcgcggggagatccgtcccggggatacgctgattgaagccaccagcggtaacaccggtattgcgctggcgatgatcgcagcgattcgcggttataaattaaagttgctgatgccggaaaatatgagtgccgaacgtcaggccgccatgaaagcttacggtgcggagctggtgctggtcagccgggcacagggcatggaaggggcgcgggacctggcgcagcagatggcagcggacggggaaggttatgtgcttgatcagtttaataatcccgataacccgctggctcattaccggacaaccggcccggaaatctggcagcagacggacgggcgtatcacgcattttgtctcagccatgggcaccaccggtactattaccggagtggcgcgttacctgaaagaggtcgcaccgcaggtcagtatcaccggtctgcaaccggcggaaaacagtcagattccggggatccgccgctggtcaccgggctatctgccggggatttttcagccgcagctggtggatgatattctggatatcactcagcaggaagcggaagacaccatgcgccaactggcgcaacaggaagggattttctgcggggtcagttccggcggtgcggtggccggtgcactgagaattgcaaaagcgaacccgggagcggtgattgtcgccgtaatctgcgatcgcggcgaccgttatctctcgaccggcgttttcggctgagacattatcccgctgttttgccggtgtatttcatgtgcagcagcgggaacggatttccctccccatccagttcagaacggccggtctgtgtaaaacccatatggcggtaaaaaccagcgccctgcgggttctgctcattcacatccagctcatccgcctgtaactgctcaacggcataattcagcaggaatttgccggtacctttgccgcgaatttctgcatccacaaacagcatctcaatcctgttcgcgtctgtgccgagaaaaccgtgaatttcaccgttttcatcctgtgccaccaccacattcaggttcggcagataggtattgagcagcagcggacgcagtttttcaatatcagcctcacataagaagtcgtgtgtggcgcggacagatgattcccagatggcaaccaggcgcgggaaatgatccggtttggcgggggtgataattaacatgaagaaatccgtaaacagaagatactgagaatggccggtgtcccggcattccgggacacgctgcgggtgatcagttattggtataacgtttcttaggggtacagatatacacccaggccggcggaacgttgaacaatacacgctctttgcggaaatggaaataacggcgcagatatttctcaaatttggtggtgtactggaacagaataaactgcccgtcgctgagttcgatattgtcacgtactgctttcagaatgcgcagtccggtgcggcggtcaatcgacaggaacggcagaccggaaaaaatcacattgtacgggcggttcagtttctctgccgagtcagaaaaaatccccagccggttatcctgaaatttattcagcaggctgacaaaatagggatcaatttcataggcatccagttcagcctgcggattcatctgatccagaatctgacgggtaatcaccccggtaccggcacccagctctgcaaaatgctgcacaccgctccagtcgacgtgacggaccattgcacggcacagccagcgtgatgaaggggtaattgttcccatcgtggccggcgatgcaataaactttttgatgtacgcgtaatagctcagtaacggtgaatagtttgatacttccataataagcattccttacaaacccggatacaacgcacgtgtaaatagtcacgtcagtgaaacgtattcaatatcatatgccgattattctctttcctctacagataaataaggaatttttcagccggtgaaaaaatcaaaaagttcataaaactgtcatataaaacaatgcaatagggtgttttattttcagtttttaattaacaggcagataagattgatttgttataaataataatcagatgaatgaatgagatagctgacagggaaagcatagcggattaaaaggcggttagtacaggaatgaacgcgacttttgcaaaagctgacattaacggaataaacatgacactccgtaccggtatattattctggtaataagccggtacggaataagaattaactagtgatgtatttttccgtgatccattatcgcctggcggaggcgctgctgtaactcataacgctgttcatacggcagcgggttgctgtcacccaggctgaccatcagttcgttcatttcagtgatactgttactctcaatggctttttccacatcagcaacactctgtgcataatcgctcatacggctgtccttattcagtctgatagtaatgcggttatcctacctgaacagccgtaaaaacgttagtgcaaaacggcggtgatcaggcggcgtgatcattgtggcgggacggcggctccagcggcggcaggccgtgtgcggctcttgcccggtcacaggcggcattgtgtacaccgctgacccacgactgatcaaactcacggcacggcgacgggcgttgtgcgtaagcgctgcacgccacacactgaccgacttccccctgaagattgatacagcgcggggatttctgatcagtgcctttcatacaggccataaaatcattcactttttctgtcatctctgccggcaccacgccgcccgtactgtctgtttccccgtgataaaacgagacccggaaataggcacagcacgccccgcactgcatacagggattggtgtccgcatcagtaaacgcaattacattgctcatgatagttaaccacattatgcaaacgcggtgattatttcaccgcaggccgagttttgtcctgaataagctctcagggcggattattatttttattttgccgcgcaaattcaataaaaataaacagcagcagatcacaaaataatgaattaaattaaaataataattcttcatatgaaagacaggcaaaataatttactgcatataaaggtatatttctgtttttaaaagataaagtaaatatccctccggcggtctctctctgcacgatatgctgctgctgagtctgataaccggtaccgtaatgtaaaatacagcacagtgccggtcttttccgttatgctgtagccctgttaatcagtcgctgagaatataatggaaacggatgatcgcctgcgctgcctgaaacagttgttacagactcacaccgcagagcacagcggcgggtgggatacagctgttcccgggctcgcattatgccggtggacgtccccgtcacaggcgcaaacctggacttatgagcccggtatcgcgcttgcggttcagggcgcaaaacggatcacactcggggataatacctattgttaccgtcccggggatgtattgctgacatccgtggatatccctgcgatagcgcaggtctgtgaggcgtcggaacaggcaccgtttctggcactgctggtcagtcttaacctcagcgaccttccggcactgatgcaggaaagcggctttcagctgctgacttcagaacccgctgtaccgcaggcagtatgtccggtcacagaagcgttgctcagtgcggtctgccgcctggtggcgctgctggacaaaccggacgatatcccggtcatggctccgcttatccataaagaaattctttattacctgctgaaaagcggtcagggcgcgcggcttcagctgatggctgcgcataataaacagtgccgccagataagcggcgtactgaattacctgaaagcgcattttgatcagccggtatcggtagagacactctgtcatcatgctcagatgagcgaatcctcttttcaccgccatttccgccgggttacccggatgagcccgctgcaatatcagaaatggctgcggctgaatgaagcccgccgtctgctgctggtggaatcggcggatgcctcggaagcggcttttcgtgtcgggtatgaaagcgcctctcagtttaaccgtgaataccggcgcttattcgggttacctcccggacaggataaaaagcgggttcttctctgaccggtgtgcgatttccgggcaaaatgacaggatcaggcaaacatcagagcggacaggttaacgtatttgcgggacaggccggttaggataacgggattgacgacatcattcctgagtgagtaacacaatgaaaaacatctttattattaacggttcaaaagaattcggcggctctggcggcaaactgaacgaccatatgaccgatatcgcccgccgccatctgacagaaaaaggcatgaatgtccgtgtcacccgtattgatgacggttatgacgatgaacaggaagtactgaattacctgtgggcggatgtgattatttaccagatgccggcctggtggatggaagggccgtggattgtgaaaaaatacattgatgaggtatttacacagtctgacgaccgttttcatattaatgacgggcgcagccgccgtgacagcagcaaaaaatatggctccggcggtgtgctgaccggtaaaaaatacatgttatctgtgacctggaacgcaccgcaggaagcctttgaggatgaaaagcagttctttgaggggcggggcatcgacagtgtgtatttcccgctccacaaaaccaaccagtttaccgggatgacatcactgccgacattttcctgttttgatgtggttaaaaacccgcatattgatgcggatatccgccgttatctggctcacctggatgtgaatatcgcaggctgaaccctcagcgggccactgatgccaggcgcaggccgagtgcaataaaggtggtaccgacgaggcggtcaatccagtaatgcgctttcgggctgccggagatccgtgcagccagtgtcccggcaatcagtgccagcgtggtatcagtgcagaacccgagcagggcataggttgcgccgagcagcaggaaagattccgcataataactgccgcctgccgcaataaactgcgggaaaaaggcaataaaaaacagcagcactttcggattggtcagtgtggtgataaacccccggatcagaatcgattttgcggctgccttctgaatcaccacttcttcattatcatcagcgctctgcccgcgctttctgagtgtgccgaggatcattttggcaccgaggaacgcaagatacagcgcaccgagatacttaatcacggtaaacagtgtcggcgatgcggcaataatcgcccccagcccgacagctccggcaatggcatgcacactgctgccgagcatcacccccagtgcggacaaaataccggctttgcggccgttggccaggctttgtcccagtacataggcaatatccggccccggcgttactgcaaagataaaaacagacagtaaaaacagcgggtaatggataatatccagcatgtgacagccctccggagtcagagaaaacgttatattatggcggatataatgccattaagtatgattcgctggcaaatgacatttttgccggtgatttgtacgtacatattgatttgctgaattatataaacttgttcaatatttataatgaattactcactttataattcagcagtgttaaaaaacgggcggaaaaagagtacgcatcaaaagagtgtttccggatggcagatagtgtaacaaaacgtaaaagcacggctttacatccggtaaagtgtattatactcagctgcaccaacggtaccgtttcatcaattaattagctgaattaaaagatgatattttacttttggccttatttttgttgtgggtatcaccggatatctgcgaacttatttttcattgtaaatgataattatctgatacttatcactgtatgcgcggtttctgcggataaacaacaataacagcctgataccgttagcttgcgacaataacggcagtgattaatcggaatttcttatcaacgggtggccggaacctggcggctgccggacgatatatgtgacgccggaaaaacagattccggcgcttacaatccgcaggagattgcagttgaaacgcctatttttcagacaacggcgacgccgtttgctcatcacattacttgttttcctgacgattctggcaggttacgggatatacaacgccattttgatgaaggcaaaaggtgttgaggaacattacactcaccggggagagattaaacagtattctctccgtgacggcagccagctgaagctggatactgaatcccgcgctgtggtggcctatgataacggcagccgggcggtagaactgctgtccggacgggcgcgttttgccgtcagcgaaaaccgtgaggaacagcgtccgttccgggtcaccgccaatggtgtgcgggtggaatccggcaacggcaactttgtggtggatattgcggataataaagtctctgtctgcccgctggatgaaaccgttaccacgttttttaacggcaaaaccgaaacggtggggccgggacagcgtctggaaattctgccggaaggccgggcaaaagtgtttcagcgcaaatataccgatatcgactggttatccggctcactggtgctgaataatatcccgctgtcagaagcaattgagatgatcaacagttaccgcgcggtaccggtggttctgctgaataatgataagaaagatattattgtggatcgtgtgctgcatctcagccgtatggatgaagaggttgaggagatgatgcgttctctcgggctgacccgtgaatcgctgccgggctcagaggcttaccgctgagttgcctgtccggcgataaaatctgactgtccggcaacagcggtagcaactgatcaccggtataatgatatggaatattaccctgattaaccgctgtacagcagctggagagaccgatgacatcagcagaaattgaatgggccgattttgaaaaagtggaactgcgtgtcggtgtggtactgaccgcagagcttaacccgaaagcccgtaaacccgcctatatctttactgtggattttggtgagttcggcgtgaaaacctccagcgcacaggttaccgcgttatataaaccggaagaattaatcgggcgtcaggtattatgtgtgtgcaactttgctccgaaacgggtggccggtgtgaaatcggaagtgctgatcaccggtgccgccaatgcggacggggatatcgttctcgcggagttttccctgccggtacctgccggtcaccggctgatgtaacaccccgtcgcctgtcgttttccgcactctcaggggtattccatgaaacggccagttatctcattacgcacctaccggcaggaaaccctggagcacagtcatgatgacatgtggcaactggtactgggcggcagcggcgcaatggaactgactgtcggcagcgacagcggttcggtggagcagggacggatggcggcgatcccgccggggtatcaccaccgtttctgcggcaccggtcataaccgccaggtggtacttgaactgcctgcggacagcctcttctttacttcccctgattccctgtggtctgtgctgccggatgccacccgtgcttatgtggactggcttatttgttatccgcagatgattgaacagcatccggaaagtgcgcgtattctgctggcagagcagcttgcggcgcaactgcagccggacgggcaggacaggcgctggctgcatactctgacacaacagctgaccgcgcgtcctgattacccgtggacggtcagtgaaatggcgtcgtgctgtgcattatcggccagtactcttcagcggcgcctgctggcggccaccggtaaaacaccggcggtttttctgacagaaatacgcctgcgccgggcacatcatcttatctgccataccccgctgacactgccggaaattgccctgcgctgcggttacagtacccaatcttccctgaccagtgctttccgccgcttttacggtgatacaccggccagtctgcgcataaaaaaagggtgagccggagctcaccctttttgcttttatatattatttcaatcaggcagatttgttgtctgcactttgcagcattttgcgtaccggcacaatcagcacacacagcactgcggcacagataagcagagcaacagaaacgtgtgagaagaagcccggcaggttcatcagctgatccggacggacattaccgcccatgataccggctgcgaggttacccagcgcactggcacagaaccacagacccatcacctggccgcgcattttcatcggtgccagcagtgtcatggtcgccagaccaatcgggcttaagcacagctcacccagggtcagcagcaggatactgaaggtcagccacatcggggagacaccggcactggtttcaatcacacgctcggatgccatcatcatcactgcaaaaccacccgctgcgaacaggacaccgaacataaacttggtgatactgctcaggttcatattacggcgcgccagggcaggccataaccaactgaacaccggggccagtataatgataaacagggcgttgatggactggaaccagacggtcggaatttcaaaaccgaacaggttacggtcagtgtaatccttcgcaaacaggttgaatgatgtcggtttctgttcaaacgcagaccagaacagggcggcggtgactaacagaataaaacagacaaataaccggatgcgttcactgctttccagaccggcaaacacaaacaggtagatgaagtagagaataaccatcccggagatgaggtaaaccatgttggtggcaaccagcatcgggttgaacgggataacgccggaggcgatcaggacagtgacagcggcgataaccgcagccgccaggccaacccacttaccgacatttttacgcacgacagtcgggcgatcccagctggagtccagaccgacttcaccgtcatactgacgcatcagcggtaccgcgtagaagcggaacaccagcagagccactaacatccccagaccaccgataccgaagccccagtgccagccgaagttaggaactacccagccggtcgccagcggtgcgataaaggagcccatgttaatccccatgtagaacagggaaaaaccgccgtcacggcgtgtatcgtcctgtttgtacagcgtaccgaccatgaccgtcacacaggttttaaataacccggtaccgataacgataaacagcagaccgacaaagaacagctttggtgaccagattgccgacagggcaatcgagaggtgaccgagtgcaataatgattgagccgtaccagaccgccatgcgctgcccgagccagttatccgccagccagccgcccggcagggaggtcaggtaaatcgcaccggcaaaaataccgacgatagcggaagcctgttcacgcggaatatccatcccgccttcatagacggtggctgccataaacaggatcagtaacggacggataccgtagaaggagaaacgttcccacatttcggtaaagaacagcgagctgagcgggtaagggtgcccgaagaaagtacgttttttgtttgttgttgattgcatctgtaatttcccaaaggtttattccggagaataagcctgaaaatggtaaggataaacagttcctgttaacaaaatgatacttttgtgtatcaataaacatcctgtcttattaaagtattattaacacacttatcgtgaatcgtattcacttaaagcacgttttctattttataaaccattttttagatgaaatgtcgacaaaaatctcatttcacaagacttatttatataaaatgtgatgaggtctattgacagaagatgtggattatgaggcttacgtatatttgcaaaattattttaaatcaacaagttaaagttgactcataacggaaagatgaaatttcagtaacaaattgctgacagtgaaaagtaaccggatgaaaaccggcgatatctacccgatatcggccggtttaattttctgagcgctctgcgattttatgcaccaccacgaataaaacagattaaacagtacaaccgcagcggtgaaataaaagacagatgcgaagccgaaatgtgcagccacccaggcgcccattaacggtcctgtaacattaccggcatcacgcagtgcctggttatagctgaaaatccgcccggcaatttcatgggtgatatggtaaataatcagggtctgtacggcgggcagcagagcggcattgacggcgccgagcagaaaacgcagggcacccaactgccagtaatgggtgacccaggccatcggcagaataacaaacacagacaccgccagcatggcgatcagcactttatccggccctatccggtcactcagttttccgaggcgcggggcactgatcagcgcggccagccccggcacagaagcaattaacccgctgataaacgccaggttttcagtatgtccgccgagttcacggatatacagggtgataaccgggctgaccgagcccgccgcaatctgaatacacatggtggtgaaaaacaggcagatcaccaggcgcggattttttatcgccgcaaaaacctgctttgtgttgagcgcatctttgcgtgacaccggcgtgaagttttcgcggacaaaaaacagtgtcacaaaaaagcagataaacaaaacgctggcagtgatatagaagacgggacgcagtccggtgtgatccgccagaaaaccgccgataagcggaccgataagtgcaccactgacagcgccggtggagagtgtgcccagcgcccagccggtgcgtttgaccggtacctgagtggcaatcagggcattggcattcggcacaaagccgcccagcagcccgagcagggcgcgcaggaacagcaattgccagacattctgcgcaaagcccatcagcagcatgacaatcgccataccgagcgcggagcgcagcagcatcagcttacggcctttacggtcagagagtttgccccagaaaggggcagcgatggcagaaaacaggaaggtaatactgaatgccgctcccgtccacagattgagctcctcatggtctgtcaccccgagctcttccacatagagcggcagaaagggcatgatcaggctgaaggcggcgccggtcagaaaacagccgaaccacacaacataaagatttcgtttccagttacggttgggggctttgttctgcatcagggtagtaatttaattccttttttaatggactttgtcccggtcatgatagagggatggttcaccttccggccgtgttttgaagcgacggtgcagccacatatactgctccggggcgcgtaaaatttcggtttccacaatatggttcataaaggttgcggcagccacatcatcatcttccggaaagccttcagcaggtggctggatcagcagctcataacctttaccgtccggcaggcggcgtggtgtgaacgggatcagaaccgcacggccggctttgaccaggatggaggtcccggtgatggtggcggctttctccacagcaaacaggggagcaaacacacttttgcgcgggccgtagtcatgatccggtgcataccagagaatctcaccatcgcgcagggcgcggatcatccctttgacatctttgcggtcgagcatggatttgttggagcgcaggcggccgatggtctgcatccagtccatgaccggattatcattcggccggtaaacgccgatacccggtgtgtggatcccgataatccgggcacccagttccagggtcagaaaatgaataccgacagcaatgatgcctttatgtgctttctgcatttcataaatgtgctcaaaaccatcggtacggaaccagcgttttacccgccagtccggccagaaccaggccataccggtttcaaacagccccatgccgacggattcaaaattcgccaccaccatcgctttgcgcttttcttccggcatatccggaaaacataactgcagattgcggtctgcaatctccgcgcggcgtttgagaaaacgcatggacaggcggcccaggcgggtgcccagccggtaaatcaccggatacggcagtaacaccagcacatacagcacacccaggccaaaccaggtcagccagtagcggggatgcagaaacgagcgtttaaattcaggagctgtaatcatagtcagacatcgttattgttcaaagcatcggcagatgcgggttcatgtaaatgatataacactaaattatacgttgtatcagccgcaggtgttagtgttctgcggtgctgttttcttcgtccgtaatgctgttgagctgcgtaaccagctccgcgaggctgcccgccgccattttttccatcactttggcgcggtgcacttcgacagttcttaccgcaacataggcgatatccgcgatttcccggttcatcagcccctgtgcgacaaaaccggcgatctggcgctctttcggcgtcagggtctgaaaacggtcacggatttgcgcacaggccacggctttaccggttacagcggcggcgcgggtcagtgctgcctgcaacggttgcgtggccaccggtttctgcagaaaatcc

SEQ ID NO: 94 - DNA, 4287 bp, unknown
  Altogen 322075 strain
accgcaccgagtttcatctgttcaaccgccatcggcagggcgccggggccgggcagggatatcaccgccagtgtgctgtgctgctcctgaaggatctgatgcacacggcagccgtcaaaatgcggcatgcgcatatcaagtaacacaataccgtaagtgtgcagcggtgcctgtgcaacaaatgtccggctgtcattccagacacacacctcatagccgaggctctccagtaaaaactgacacgcctgtgtcacagcaacatcatcatcaaccaggtggatcacgggcatggggattcctttgtcggttcactgaagataagggtaacacataagccgggctgttcgtccgggccggaacaattttccatatgaatatcaccgccctggctgcgcatcaggcgctggcagatcaccagtccgagcccgagaccttccgcccgggtggagcggaacggggcaaaaggttgtgtcagctgtgtttcatccattccgccgccgttatcctgcaccaccagaatctgcccgccgggggtgtggtgatgtgtcacacggatgcagtccgccccggcctgcaaactgttactgaacagattggaaagcacctgatccagcagtgccggcggtaagtgtaatacggcatcatgagcaacggtgttatataaaaccgcagaagggtatcgttccgtaacccgcagcagtttccagaccagttccggcacagccgccacattctgcggtacaggcgcgccttccggggaggacgggctgtttcccgcccataagcgcaggttgcggataatgctggccccgcgttcggcctggctgtcaatctgcgacatgaccggcagcagcggatgtgcgggatcttcgcgctccagccggatttgcgagccctgggcgtaatggcggatagcggatagcggctgattcagctcatgcgcaaaaccggaggccatctccccgagcacactcagttgctgggctttttccagatcctgctgctggcgctgtaactgtgaatgggcggcttccagctggcgggtgcggcggcgcacccggaaagcaatccacacatgattgatgccgagaagcagaaaaaccagggcaaccgagcctaacagccagctgtttttgcggctccagctgataatttcctgccagaactggcgctgctgcgggtgctgattgacttccctcagcagattttccacctggcgggtggatgacggcgcaccccagcgcatggtttcttcgccgtggctgttaagcagcacacgggtgacttcatccgccagttcgtccggtacaccgctgcccgccgcaaatgaccagttcgggtataattcgctgctggtccagcaggggatggtgctgtcccgtccgagaagcggccggaaatcatcctggtgaatgagtccctctttatccatggattcaatcaggcatgccgggacaatagcaccggaaatcgccttatcccgcagcagataaagcagggcatcagccggaaaaccggaaaactgaagatggtaatcacgcggcgggtcgatacccgcatcacgcaaggctttatagcctaataaatagccgccgaaggcatcgggcgcgactgccccgacttttttaccggtcagatccgccggggtctgataagggctctctttgcgcaccagcagcacactgccgatcacattacgggtggcgttatccggctcataagccgaacgcagggaaaccagccagcgcaggggaaagttgctgtccagctggataaactgtgctgggttggtgaggacaaactgtatctcattattgtgcagcgcttcccgcatctgatccagtgtcagcggcagcagggtgaagtgttcgccgggcagggcgcggttgagctgctctgtcagcggctcccagtaatgacgtgtcggcgcatccccccgcagtgccagcacaccgatggtccactgtgcggcaaatgaaaaagaggtgaaaaataacagtgcggtcagcaaacctgtgcgtgcggctatctgcatgtgtccccgggtcagtgcgtcctgtgtccgttttctgagaaaaatctgttgttttagatcaatgtattccccgttatgtggttaaccacaatagggggactctccggcaatttttacaatccccataatgacatatccctttactcaacaacatgtttattcctttttggttgagtttgaatacgacgagcaatgaagttccaaatacaccggagagcagtatggatcttggcaaacgaaaatttctgcaaaacctgggcgtcctgacagcaggtacggccctggttccgatggcggaggcaggtctgcttttttcgccgccccgccgtgaaggcgacccgtcaaagcgctacggtatgctgattgatttacgccgctgtgtcggctgtcagtcctgtaccgtcagctgttcagttgaaaaccagagcccgcaggggcagttccgcaccagtgtcagccagtatcagattcagatccgcaatgaagaggcgaccaccaacgtgcttctgccgcgtctgtgcaaccattgtgataatccgccgtgtgtgccggtatgtccggtgcaggccactttccagcgcgaagacggcattgtggtggtggataacacccgctgtgtcggctgcgcctattgtgtgcaggcctgtccgtacgatgcccgctttattaaccacagcacacagaccgcagataaatgcacattctgcgctcaccgtctggaagcggggctgttaccggcctgtgtggaatcctgtgtcggcggcgcacgtattatcggtgacctgaaagatccgtccagcaccatcagcaaaatgctcagagagcatgaagctgcgattaaagtgctgaaaccggaaaacggcacactgccgcaggtgttctatctgggactggatgaggctttcgttcatccgctggaaaaccgcggacagcccgcattatggcaggggatccactgatgactgaacaaacgatgttaattcaggaagtgctggcccggccgcaggaaatcacctggctgccgtgggcggtgcaatacttctttatgatagggatcgccgcctgtgcagccctgtacgcctgctggcagcgctggcggggagacaaacgggatgcccgcctcgagatgctagcggtctttatcagcatcaccctcgggatcgccgcgccgatggcactgacagcggatctgcatcagaccgcccgtgtctggcatttctatgcttatccgacgccgtggtcgtggatgccgtggggcgctctgttcctgccggcatttaccggctgtatcggtctctatttcctggcgctggtggcggacaaaatctggcataagcaatttaaactgacccgctgggtggcactcggcagtgccgcattcgccatcggtctgctgctgtataccggccgtgaggtttctgtggtgcgtgcgcatccgatctggttcagttactggatcccggtgctgctctttttcagtgcattacaggcactgcctgcgctgatgatgctgggggcccgctgtgagccgcagtatcaggcacaactggcgcgtctgcaggtggtttcgttactgctgctggcggtgtgcatgggcttctggatcgccggtgacaccatttccggtgccgctatccgcgctcagctccgtttcggcacaaccgggtggacactggcgatgggtgaaatcgttctgtggattgcgctgatggtgctggcggtccgtctgctgacccgccgcggctcagtcgcgtatatcaccgttcatacgctgctgacactgttcctgacctggtcgctgcgctggttgctgctgatgcaggtacagacactgccgaaatacaatgttatgcacaatccgtacagcctgccgatgggcacggatggtattcaggccattatcggcacaattggtttatggatagctctggtgattatattccgtgaaggtatccgctgggttaataacaaagtacagaatcaacagaaagtcgcgcaggacgggggtgtacaacatggctaagtcaacaagacgtcagtggttaaaagcaggtttggcgatcggcggactggcagcgttcggttacagttaccgcgatgtggcgaaacgcgccgtcgacgggttgatgaacggtacttccggtaaagtgactctgcaccgcattaacggtaactcgctgatcccggaagggaatgccctgaaaggctggcaggcggaaaacgcacaagcggtctcaatgacccagtgcttc

SEQ ID NO: 95 - DNA, 9384 bp, unknown
  Altogen 322075 strain
taaagggatttttgtttttcgagcgaagccagagtggtctgtttgttatctctgagacgggcggtcatatcacggatatgctgtaactgattttcaatttcacggcgctgattatcactcactacaccaccggctgtagccctgctggtatcaatacggtaaaccggttctcctttgcggataacctgcccttcattcacatattgcgcagtaataaacccctgtacaccggcagatacggtaacagcccggggattggtggtaatttccccggtcacactgacccgccgcgtataactgccggacaaaataaaggtcagaaaaaccactaaaaacagaaagctgcatattattatcagccacagcggaataccgggtaataataaggccttaccccgccatttcatttttcggttatcgagtgcggttttgcggaacacaataaaccctgcctgcggttatccggtgaataaaaggccgtcagtatcagggaaaagataaaaaaacgggaattcataaaataatgaattccctcaaaatatgatattgactgctgaacagtcaataatgcgggttatagtattaattaaccgagcagttttttaaataaaccgccaacacccggcaaagatgttaagcgtgattcgattttatcacctacgttaccgccaatctgagatcccagatctttacctaagcccgggaatttctgtgcgatattgatctggccaaacagaggcactttgacattcatataaggaccaaatgcctggaatgccgcatcaccaattttgctgccgacacccactaagccatctttaataaaaccggcaccagaaactgcttcaatttcctgaatacttaactctttcatatttagatttccctttcattatttatgacttcgtctgaacatagtcagcccggtgcttattttagatgaattgacgaccggtaataaatcaggagaaggacgtaataaaaattaatgactgttacagtacacaatgacaaagttaatttgcttacctaaaaatattacttatttatcatggcaatagaagtattttataactttacattacttttcagtagtatattggcttacgaaaatatgatttatttttctgtactctatttccgtaaaatactgagatttttttaatgaatttaaaaaatatcaccggctttttacagaaaattgtaccggaaccagcacgactcctctgataaccggcagatgtattatcgtatataaataataacattcagaaaataataaaattatataaccttagtgtaccagtaccgttttgtggtctgtcaggataaatacagacgattctgatgataaagatttatatatcaatgaccctctgcggaatattccgcagagggtcatcatttatactattactttatcagcgtattatttacaaataccaccgagatctacaatgccgcctaatttatcttcaataaaaccgccgacagccgaacccactttcccgccgacttccctgcccagtcccgggtaagcatctttgaggctgactttaccgatcaccggcagatccaccgtcagataaggcccgagcagttcaagaccccagtcaccgagtttttttccgagatcggtgatagtgtcctgaacacatccggcaccagaaaccagttcaatttcagcacaatttaattctttcattatcagtccttttaataatcagttattttatctgaataataaaatgagtttaaaaataacaaataaaattattattttatatatcatctattattcatccgatatcctactgattattttaatgaagagataaatcaatatttattactccgatatctgaaatccggaataataaaaaacaggacgatattattcataatatcgtcctgctgttttcacaactgaaattaatacagcggtaattgttctgtcagtacaccggtgaaatccgccaccggtgcagccatgcattccgcctgtaacgcataagatagctgcatgctgtcatgactgatttcactttccgcacgggttgccggtgtttcagatgagaatgatgccagcagagtgctgatatcatcatgctgcgggccgctggtcagcagttgcgaaacgggcagcgacacgatatccgcagcgggatcctgctcacccttttcatcctgcgggtgctgctctgacatcagcagtgctttggtcatcagcccgtccatgtctgccggagatgaaaaagcgtgtccgttatcatcatcagcggaaagcagtgttttgccggagactgaaatcgtatcgctgttaccggagattttactgatattcccggccagatcggtctgtttgacctgaatcgtgccgcggctgtaatccccttcattcagtgtgaagctgtcaccgtgacctttcagccagcttttaccgccatccactgaatattcccaggatgcatcattttccagaccggtaagaacaattttaccgccgttaaacgtctgtcccggtgccgccggtgccagggtatcaatcaccagtttgtcatatttcgcaacctgactggcgttaccgtcgttatcaaaataacgcacctgcacctgatgggcatcgtaagtaccgtctttgatagtgaaagaagtctgagagcctttactccaggttttcccgccgtccgttgagtattcccagcgtttcatttccgtcatgtctttcaccatcatccggttattggatgtgatgttatcgtgatcagaaacgcctgtatctgcctcaagggtgagtaccgcagctttcgccggggaatgtccgccggtaaccgtgattttatcaccttcgttaccctgtttatcggcactgctgatggtgccggtttcaccggttttaaacggattcggttcggcaacccatgtaccgtcggctttcacttccactttctgcagcagattgccttttttatccttaatcaggatatagctctccgcctcacccagtccggccagtttgctgccgctgttttcggtaatctccggcgaggacggcggtaatttgataccgctctcaactgcaatatctccggttacgttaccggccgcatctttgccgagcatcacaccttttgagcccgctgtgtacgggttcggctcgattgaccagtttccgtctttatccacacgggctttgccgatgatctgattaccggcatttttgaaaataatcccggttcccggctcaccggttcctgacagatgtgagctgttattttcggtaatgaccgggtcacgcggcgggatacgatccccgctgtcaaactctttgctgtgactgtcagcagagccgtcggcagatgcggttatcgttcctttctgaccatcgcccagcgggtttttatcgaatttccattcccctttgtcattggtcttcgtggtaccgataacgtcaccctgcgcatctttcagtgtgatagtactgccgggcgtggctttaccgctcatccctttgctgttattggtggtgatcaccggctccggtaacggtgccgcagtaccaccggtaatggcctgttttgcactttcccgtccggcattattaacaacataaatggtgccgctttcaccggcagcaaacgggttatccgcaaaatgccatttaccggatgaatcggtcatcgtggaagcaatcagtttaccggcggcatccaggatcataattttactgcctgccgggcctgtcccgctgagagcagtactgttttcctcaaccgtcggccccagcggcggtgcattctgcccgacattaatgctgatcggatcactgaggttaccgctgaccggctcttttgacacaatctcaatcagtgcgccgtccggtaacggttttttgacaaaccaggtgccgtccggattaacggtcgccacttcggtatgcgcaccgctgctgtcacgccaggtgaccagcacgctgtagcctttggtcacagtaccggcgagggtgaattcatcgttttgggtgacaaccggctgctccggcgcggtctggttgccgccggtgatatcttcatgcttactttccaggccgttttcgcccttggcataaatcttaccggtttccccttctttcagcgggttggtggcaatcgaccagttaccgtttttatccacttttgttgtggcaatctgtttaccgtgatcatcaagaataatcaccgtactgccttcagtgcctttcccggataaaccatggcggttattcagctcaaccttcggcacatcaggggcttttcctgtacctttatcatcatcagaaccggattttcctttgtcaccaccgctgctgtggtttgccagcgcaacaccgccgccaatccccagtgcgccgagtaacagccagcccgcatccacttccggaattccggattcccagctgatggtatttccggtggtatctgactgcgtcagtacggcagacgaactgctgctgagtgaatctgcggcaataccgctttctgactgatacatcaccatggcaccattggtggtttctgccaggatgtcacccttataaaggtaataatctttgataataatgtccggctcgtctttatccggatcggaataaatccagaggtcactgcccgcgcggctgactttaacctttcccggtaactgaccggacttatccgtcagaaggtaatcggtatcggcctgcgcctgaatcaccagtgtggttgtctgtgctttgcggccgccaagaccgggaaccgcagaatcattaatctgtaccagactgccgatattcatcacggatttctgaatattggtcgccagcgtggttttgtgggtggttttatttactaatccgactgaaatgcccaagtctcacctctgataatactgacgttttctgtgttctgacagaaagcgccggatacgaaaaagagccgggggttatcccccggctccggttactcatactgtctgtcagaatacgatctggtggttggcaagcagcatcgccagatccactttatcgccgttcggatcattcccgaagtcgatatccgccagtttctctgactggtaacgtccgcccagaccatcacggtcaagatagagcgaaccattttccagtttcagatagttggtgatcgtgttatccgagatctccgctttaccgttaacgtatttcgccacatcgtcgtatgccttaccgttataaccgacgagtaactctttgatattgataatatctgcgttagctgttgcttcgaccgtaccggcccagaagttgttgatctggtcaacaccatgaccaccgctgttatcatcagccagcaagcggtacatgatggtgtcctgaccgccggcacccagatggaaggtgttgttcccggcgccgccgtcaaagaagttatccgcagagttggagtagaaagtatcatcaccatccccgccgcgaatcccttcaatattgctgaacttctgcttaccgtagccggtttcctggtaatccgtcagacggaggtcaaccgttacgttagtcttaccggcaagtttgaagtcaacgatatcaataccgcctttatcactccactgacgggcaccgttcaccagatagctgccgccgccgccttcataggcgttttcacccagtgtggcgaagaaggtatcgttgtaaccggtaccgaccacaccgttaccgatgttggcattactggttgaggtacctgattctgcggtcagaacataggaatcccagttcttaccggttgtcaggccgccccagctggcattgacgttagcgatatcaaaatcacccacacggccttccgccccgacgttctgctgaataccgttaacgttacgcagcagcactgcgttatacgtttcatcggctttcaggccgtagaaactcagtaaaccggtactgttactggtctggttacccgcctggtggttaatgacctgcgtggcaaccaggttaccgtcagagtcatacagcttcactgtgttaccgaagaaggcattaatcccctcgtggtcgaggatcttaatgtgcattgcggtgccttctttcagttcgttttcattcttaatgagtgtcgcgccctgagtaccggtaaataccatcagatcctggcgtccgtcccagtctacgtcgatattgagcaggccgctgtaccctttaccggcagagtttttcagtgaaccgatatcggttgagtgcagaacagatttccggaactgcgttacaccgtttgctgacatattggtctgcagcgcaacttccatcagggtttttatcggcgcaccgctgtcgttcaggcgcgggatggtgacgatatcggtcttaccatccatgttccagtcaacactcagtgcaccgcccacatcacctttatccatgaagttgtaagcacctttcgcctcgctgatggtgcctaacgcggtattctgagccagataaccatgtccgtcattgaacaaaattgcactgttaagattcagcgtaccttccgtgacacccgctgaaccgacaaacatatccagccagccgtcaccgttgaaatcagcccagaccagagactggccattgaagctgctgctctgcagttcaccggcgacgccgtttgccccgaaaccggttccttcaatgccgctcaggatctgtttgacatcaaaaccaccggcgccggtgttggaaacaacaaccagtttaccgctgcttttcgctcccgagtaggtggcccctgttccggtgataaagtttgaaccattgtcaccgctgtagacgatatcgacgttaccatcgttattcaggtcaacggaggacactaatttatccggtgttgattgtttctgctgaccgtgctgcgcgaataaaggatccttatcggcaccatacaacccgtcaacataggtcgcatctttatggaattgacctttatcgttgatgataaactgagtgtcgtaacctccccctccgttagcatcatccggtgttttatccccgtgtacgatatcaacgtagccgtcgccatttttgtcatacagcgcggtaccgccccaccaggagaatgtaccggcacttccggaaccgccgccgctgtattttggatctacggctccggcatatccgctactggcatcaccaataatgaatgcataatattcatcattagtgacccggtctgatactttcttatcctgactcgatatccccatcactcccggctgatatttaaaggcctgctgcccatccgcaaatttggagtccagcccgacaatatccatatagccgtcgcggtcaaagtctacgaaagacatcgacccatatacacctgcctgtccattcgatttcagggtattggttttaaacgatgatgtattggtgatattcgtaccattctgatccagcacgttcatgttggagaagatacgccatgcgccgttttcaccgatggtcatcccggtcgctttgttagctgcgtcatcactggccggaatatccggtgcagccggttctttcgatacctggatttcgttaagggtcttatccttgaccacaacacggccgtcgttgttatacagtgttgccacgacgtcataagtctgaccctgtgtcagccctgaattggccggtaacttcacataccaggtgttgttcagcgggtcaaccaccacaccgccgtccagcgaggagtaagttttaccgttgacggtcactttgacgtgctcatcattgtaaatctggaagcccacagacccggagatgatcggatgtgtatccagtgttttcaccacattgacgttgatatccaagtctactttcagcgtaaagtctgctgatggcttaccgtatgttgagccgttggtcaccagggcctcaaacttcggtgatgaaccgttttccagacggtgatcgccgggcacaaggaacgcccactctctgccgttcgcgattgcggttcccatcagtacttccaggccgctgccgattgcccctttggtggtatcaaagatcagtacagattcacggactttcagttcctgcgacaatgaaccgtgcagttcagggttacggtcatcagttacagcaccatttttgaactcaccctgttctgcaccgacgtgatcccagaatttatcaatcgtcgccagagttgccggtacggatgtatccaggttgatatcgtactcatcggatgcccccggaacaccggccagtgtttccacaaccgccttccaggtgtaatgcccgtcagtggacagtgtgccggtatactgccaggtcagatcatcattaacagtgacattggcaacccacttatcattcagataaatcgccagaacctggttggctttcagcgctgagctgacggtaccgtgcagttccggtgtcttatcgttggtgtatccgcccttatcaatattgccttcgaacggtttcacatcatccagaacagacgtgatcttaacggtctgtgccggtacagacgtatccaggttaatgacatactctgtggattcagggccgatgttacctgctttatcaacgacttttgctgtatagctgtagcggccgtcatttgccagagtatcggtcagtgtccagtttgtaccgccggtcaccttcgcataatccaggaatacaccgtcacggaacaccgccaccatttctgtttcgctcagcgcctggctgatcgtcccgttaatcgtaggtgtgtcatcgttggtatacttaccgttttccaccttgccggtacccgggagcttatcatctataatttcggtgatagccacagtctgaaccggcgcagtgctgtccatatgaatagtgtacggtgctgactcaggtccttcgttaaacgccgcatcacgtacatatgctttgtattcgtaggtattaccgtcggtcagaccattatcggtataggtccagctcaggccgtctgccttcatggtcgccgtaccggcatacgcaccgttccggaagatgacaacagtttcacccttgcccagagccgcattgatagtcccgttcagcgtcggggtatcgtcgttggtgtatttaccgttatcgaccttaccaacctgcggatccttatcatcgataatttcggtgatagtgactgtctgagtcggcgcggtggtatccaggctgatggtgtaatctttcgacaccggccccaggttatacgcaccgtcacgcacatacgcggtatagacgtaagtggtaccgtcctgcagtcccttgtcggtataggtcaagctcaggccgtccgcattcgcggtcgccgtctccagataactgccgtcacggtaaatcaccaccgtttcacccgcaccgagtttcgcattcagcgtaccgtt

SEQ ID NO: 96 - DNA, 4045 bp, unknown
  Altogen 322075 strain
gctgattttccgtgtggagatgacctggcagatgctgagaaactaaatcagattattgaggcagaaatcatgcatgctccggaccaatacttgtgggcacacagaaggtttaagaccagacctccgggagaaaattctctgtacaaataagttacaaagattgtcattgggtgccctatacccattacttatgagctgaaacctcacaatcgcagttatttatgtctgcaatttttgtttttgatatgatttccgttaactgcaaaacgggaactattatgaaaaaaatattgttgtgcctttttttgattcacacggatactgcatactcagcgaattgtgagctcgatactcaggattcggcattatgcgaggcggcaaatggtggtgacgctggtgcccaggttacaatcggatcttattactactacggtaatggtgctcccatagattataaaacggcggctgactggtatacaaaagctgcggtacagggtaatgagtacgcacaatattctctgggggagatgtattttcagggggagggagtgcaacaggattaccggcaggctattgagtggtttcataaatcaggtgagcagggaaatgctggtgctcagtttcgtcttggtgctatctatgaagacggtgatggagttaatccggactttttaaaagcggcagagtggtataagaaagcagctgaacagggaaatgcattttctcaataccagcttgcgaaaatgtattattacgggaagggaatagaacagaattaccgcgttgcagcggagtggtataagaaagcggccgatcaaaaatatgcatttgcactggcaaagttggcagagatgcatctctctggtgaaggcgttgaaaaaagccaaccaaaggccgagtcattgtatgatgaagcatgttttggtgggtttcagtcggcatgtgacagccttgcgaagctgaataaaaaaaaccagcactaattattttcaatcaaataatttttgtaagttcaggcaatttttacattcaggctaaatgtgtaaatatgcggtttgattgttaaaaattatattaaaggttattttcgtcgcctatctactaatgacggctaataaaaattatgtatttaattgaataatatgtgtttttacatcttagtctggtgtgtatcgataacttacaggtttaactcttctgagctgtttacatgttcggtcattctgaacagctaaatacttcggtatgatatggacagtattgagtgtcataattgtatatgaaaaagcccgctatggcgggcgatatgtattagcggacaaccaggacggatgtttctgcatagcggactacagctgatgcagtagacccaagtagatatttggttgaaatatttggtgatcttgagctgatgattattaaatcaacgtgtattttttctgcggtagtcaaaatcccatctatcggagtgtcaagaattgcatgataatgaacccgatcttccggaagattaaattttgaaacttcatttttaaggtcagcttctgctaacttcaatcgttgattatcttctgtaatgatttctttttctatgccgtatgaaaggccgataaacattttgtagcttggtataacgactaaaaaatgtatgtgcgggtcatcaaactttgaaagagattcgatgtgagggatgacatggttaaccagtgctttattagaagtgtcaatcggtaccagaatattcttatacatacttttctctccggtttgcttttcactataaagtataggacattattgattatcggaggtaaattattgagtaacagggggcagctttagtagattgtctattaccctataaattcaaatgcctttttaactatttttatgctgtaaaatctgaggttggttgctggtcacgaagtgatttttgtaaagaaatgtaaatgagtcattgaaagtcaagatctcatccctatataaataacgcatcagggtaagttataccatgatgtgtatttaaaaagaataaattgaaatactgaaggaggaattatgcagaacattagttctttttcattatttccggcattatctgatagtttgctgtcaaatcgctttgaccagatggaccgtttattcagtcaacttacgggcaacaggccaataacctcagaacatccatataacctgaagcaattaaatgatgcgcactatcaactgacggttagtgttcccggatacagggaagatgatcttgaggtatcattgaaaggtggcaaacttagtattcagggtaaacaacctgcagaagtagttaatgaatcagagaaatgggtacaccaagggatattaaaaagccagttttcattagaatttaaccttggtaagaatgtcaaaattcggaatgcagaattatcctgcggattgctgacattggatatagagtatgaaattccggaagaagaaaaaccacagttgatagctattgaaaataaagatataaaggcttagtttctgattttttttcccaaccccgccaatattggcgggttttacaaggcctgaaaattacagtcctaacataatatataatgcaccgttgttaatagtattttgtggattaaaggtataactacggtgtaagcctcacttcggtgaggcttttttatttttccaacttgtaagaatggctttcatgttaggttttccgaagtttccgagggccgtatgtttggttattccgaataactggatacttgctgtgagactctggtagcgcaggtcagttcggttgaactgaatcagtttcttatttcagatgcaaaaaagccggtttgggaataaccggcataaggaataagcgacattattttatggaaatttcattacctttttattatagcgtaatagtatgtatttacacgtaatataattaaaaaaaattaaccatggtgagatgtcttgttttgattatcattcagaatgatatgaagggactcgtttaccggtataggttttcatgctggcaatcttaaatttgctctgtctgtattaaatatagtgcaaatccggtggtaaggaagaaggtgatgtgatcggcggggtccggaacaaaactgaaagccgtactgaagcataaccgctggatattgggtgtcgggatggaagtggggtggtttgagcaggctaaggtcgaaatcaacagtttttttaatttttaaaattcttgtcagggtgttatccatatttctgtgaataaaagaataacaggcggggtatatggattattttttgacgttaccgggcagcgatacttgttctgttctgcataaaaaggcatgtccgaaattacaacaggcaaaaagtacagtgtatgttggatactactggggagagcacgctgcagttcagcaggctatcgttgtggcaagaggggcagtggttttatgtccgttatgcataaaccagcatgatgaagagactcagtgataatcttacaggctcaactctccggagtttccggatagctcacatgttcggttattccgaacaactgattatcacgctgtaaaagtttggtgtggatgcgtagttagattaaataatcagtggtttttatatctatgataaataagtcaaatagctttgtttattgatttttctatagctctgcattcaggactgtttccgtcaacctggtctattttgcctggctggttcccttccggagtatccatttttattacgcatgcatcctgaccggtttggtgtttgatttttggtgagcaccccgtagctaaaagaaaaggtacgataattaataatgttccagccttatacatgtcagttaaccccatattgcaaactatcagagcctgatgctatcagagtaaaagggtgaaataaaaaatatttcataaatttcaaaggtcgccatgtgcggtcttttttattgcccgcaacaataagagcattggaatacgacaggctcattacctaatctgtattcggtcacggtgctcttcttattgctttcccg

SEQ ID NO: 97 - DNA, 314 bp, unknown
  Altogen 322075 strain
cttctgtgtgcccacaagtattgatccggagcatgcatgatttctgtctcaataatttgatttagcttctcagcatctgccgagtcatctccacgcggaaaatcagtaatttctttaccaattattaattcgtaaggcctcttaccactttcattatttcttaccatcgttgcagtaagtatcggggactttgataatttggctatagttgccacaccttttgatgttgaagccttcgctatcgaaaagaaaggggcgaagatagtgcctttcgttccaaaatcctgatcaggagcaaaccaaatagcctgccc

SEQ ID NO: 98 - DNA, 258 bp, unknown
  Altogen 322075 strain
tatttaaactgaccgaccggcgcgggattaacatcatgccacccgacgaatctgccgagtcttttgctggaatctaatattttattaccatgttcatcatatacaataattccatgagccatattaataccccgatatatcaccaacaataacagtcagacgtttgttgtcatacaccttaataccatctgctgtaatagaggttccatttgttgtcgtcccgccaaagaactcgaatttattagcctttgcatccag

SEQ ID NO: 99 - DNA, 16926 bp, unknown
  Altogen 322075 strain
  misc_feature (15826)..(15826): n is a, c, g, or t
gtaaatttgaacggacggtgcgcacgctgaccggatggctgaccggactgagggtctgtcggaacagtcacaacgtgatcaaattcctgtaccagcatttcatcttcatggccctgcacatagatgttgccgacagactcagcggtaaaagctccggcggtgatattgccctgagttttgccttcaatagagatataacatggagttggcatgatcaaattccttatttattaacgggtaacaggtgattacctgacgagtaacttcgtcatcagccagtgcgcatggtgataatgattgaagcataaatttaactaatatttatgtaaagcctccggagggtcaaattgccgtctgcatctcccgggataatcatcttaagttaaaaatcgtgcacaaacaggatataaccccgaaaaaattgcaataaatgagtgttagtaaaattaaaatccacaaaatcatgatcagaaatttaacaaaaaaatagtgaaatccagaaaaacattaacagaacaatgtattacatccattccggcttatgatcagaaaaataaaataagtaacagaatgttattatctgtaatttactgatatatatgacaaaacacacattcatataaattacgctatacataaagtgataatataccgattttatagcgctgttattttttgatatgtaaaataaaatagggtctgtgggctgataacatcagatttttacttttttaccgggtaatacttatgtatttcgcttgtaatattcacctgaaaaatatcttgaccgataaaaatgttactatttattaataaaattgatttacggcatatacgtaagcacatgccgtcatttcgctgaattttgtttataaattaaaaaatcaccgcagaattatttgtgtttttattaatatatgtaaaataatatatcagagattaaattcaaactttcaccagacagagctgattaatttccgcacagtgtaattatcacacaattattactgttacttattttatattcacccttaccttcttctttatttttctttattttcaatcacccccggattaattaccattcacgcgggtaattaataagacattttactaattaaaaccaaaaatattgcaacatctgtctatcagttaactaacatacccgctttattggtaaaataattttattgattgacaggggcatacaggagacgataacttttgcattaacgtattttttgatttaccttaagttaaatattttaattagcaccaaatacaatgaattacatgtgttacgtgtattcaaccggtgattcggcccggtgccagcaatcacttatcttatgtatctatacgggacagataattccctcactgaaattcataaggatagtcaatgagtaaaaatgaccttggcagcgttgcgccgaaagaacgtattaatattaaatacacacctcatgacggcggaagccaggcagaaattgaattacctcatcatcttctggtcattggtgacttcaaaaataaggaagaagatacaccgattgaagaacgaaaaacggtttctatcgatcagaataatttcaattcagtgatggaaaattcaggtattaatctgacatttgctgttaaaaatcaccttgaagaagaaagtgattcagaaattcctgtcaatcttgatattaaatccctccgtgatttctcccctgacaatattgcgaaaaatgttcctgaattaaataagttacttgaattgcgggaagcattagttgcactgaaaggacccctgggaaatatccccgcattccgtaaacagcttcaggcgctgctggataatgaatccacccgtgagcaactgttaaaagaactggatatcgtcagcaataaataattgatgggaatcgtgttatgtctacagcaacagaaagtgtaaaacaggaagcaggtcagctccctgccggtacatccctgcttgatgaaattatgtcgcagtcccggatgacaccggaaaccgaggcctacgatattgcgaaacagggtgtggccgcatttatcagtaatattctggccagtgattcaaaagaagagccgatcaacaagttactgatcgataaaatgctggttgagctggataaaaaactcagtgcgcagatggatgaaattctgcataacgaccggtttcaggaagtggaatcatcctggcgttccctgaagttactcgtggaccgtactgatttccgtgaaaatattaaaattaatattattcatgccaccaaatccgaactgctggaagattttgaattttcacctgaaattgtccagtcaggtttctataaacatgtctattctgccggttacggccagttcggtggtgagccggttgctgcgattgtcgggaactatgctttcagcaataccacaccggatatgaaactgcttcagtatgtcagtgctgtcggtgcgatggcgcatgcgcctttcctgtcatccgtttcccctgactttttcggtgtgagcagctataccgaattaccggcaattaaagatctgaaatctgtttttgaaggtcccgcacacaccaaatggcgctcactgcgtgaagcggaagattcccgttatctcggcctgaccgcaccgcgttttctgctgcgtcttccttacgatatggttgaaaacccgattaaaaatttcaactaccgtgaaagtgtcaaacaggatcacgaccactatctgtggggtaacaccgcatttctgctggcagccgggatcaacaacagtttcgccagataccgctggtgtccgaatattatcggaccacagagcggcggttctgtcagtgacctgccggttcactgctttgaggcactgggcgagctgcagaccaaaatcccgaccgaaattcttattaccgaccgccgcgagtttgagctggcagaagaaggtttcatcaccctgaccatgcgtaaaggcagtgataacgcagcattcttctccgctaactccgtacagaaaccgaaacattacccgaacacccgtgaaggtaagatggcggaaaccaactacaaactgggtactcagctgccgtacatgttcattatcaaccgcctggcacactacatcaaagtgttacagcgcgagcagatcggggcatggaaagagcgccaggatctggagcgtgaactgaatatctggctgaaacagtatatcgccgatcaggaaaacccgccgtcagatgtccgcagcaaacgccctctgcgttccgcacagattcaggtgctggatgtcgaaggggatccgggctggtaccaggttgctatccaggtgcgcccgcatttcaaatacatgggtgccagcttcgaactgtcactggttggccggctcgataaggaataaccggaatgggggcgtattatcatcgtcagtcttcacaacccgtacgcctttttgaacggataagagggaagcacgccggtgcttcccgtcagtcccgcactgctgctctgattaattcggtcaaatcacacctgacactggtgctgaatacgcggccggaaacctgtcagagcagccgtgatctgggcgtgacggatcttaatgatgccaccgcgacggcggtggatttccgtgccagtctggaaacctccatccgggaatgcattctccgctatgaaccgcgtatcagtgatgtcgcggtggaaggtgtgattgatgagcataacccgctgctgctggagttccggataaccgcactggtgttgctggaaaatcagtctcagttaattgaatttaatatgcagatggacagtcaccggcactacagactgaagcaggcctgacagaatgccccgtaatccccgtttttctgatgaacttgaatatctgcaactgctggaagataccgttgcgcgtcacaagccgcatctggttaattttctggcggagaaaagctcagatccggatgtactgcggctgctggaaggttttgcttatctgtctgcctccctgcgcagtcagattgaacgccagtttccggaactgaccaacagtctggttacgatgctgtggcccagttatgcccggccgtttccgtcaatgacggtaatgcagttcactccctctcccgccctgcgtctgcctgtttcggtaccggcgggaacattgtttgagagtcagcaaatcacgctggatgaaagtgatgcggaagaagatgttctgcatcagatgacctgccattttacgcagagccgcgacctgcgcgttatgccgtttatggtttcctcggtgaccgctgacaggcagtcggtgacggtttcattttcactgccgcagccggtccggttatcagattccggcctgcctgaactgcagttttatctcggcggggatgattacaccgcgcatgaactctattttctgctcagtcacgcggtgtcaggggcgacactgaccacggaaaaacacacgtatcaggcggaaaattttgccgtgtcaccggccggattcagccgtgaggatgctctgctgccctatccgagaaacagttatgaagggcatcgcctgctgcaggaatacttcagttttccgcgtgcctttctgtttctgaatattgagggacttgatgatatcccggctgtgatgtccggcgatcgtttttccctgaccattcacttttcccgtccgctgccgccggctgcggatattaacaatgacagtatcctgatcaactgtgttccggcggctaacctgtttccgatggaaagtgaagccattgagctggatggcagacaaagtgagtacccgctgagtccgggctttgcccatcccggcagctacgacatattttcggtcaccagtgtggacggactgcgccgcagcggcagtcagccggtcaaaatgacacattacacacagtttgaaagcttccatcatcaggatccggtcaataaaggtgatgatgagcagtattaccggctgcgtacactgccgtcacccgatgacggtggattccgtcaccggatttcctttgtccgcagtaatgaaccggcgctggtcggctgtgatgaaacgatttccgtttctctgctctgcaccaaccgggatgtggccggttatctgcggaccggttctgttacccgctgcacagagccgctgccggatattgcggcggtcaacaatatcatgaaaccgacacaaacactgcgtccgctgctggatcactccctgcactggtcggtgctgactaacctgtcactgaattatcagtccctgctgagcctggacgcactgcgcgaactgctccagctttacgatctgacatcggtattccaccagcagactgcccgccaggcgcaaaaatgcctggatgccctggtgagcatgaccacacagcccgccgaatatctgtaccggggattaccggtgcgcgggctaaaatccaccttatctgtttatcagagcgcgttctcctccgagggcgggctctatttgttctgttccgttattgctcactttttcgggctctataccagtgtgaatacctttcatgagctggaagtgatcaatatggataaccgggaagtgtatttatggccggcgaaaatcaatcacaccgttctgcgctgacatctcctgtcagcgacggcactgccgccatgacggagtatgacttttatcagctggcagagttactgagcaaatccgtgacagcggcgggaaaatccgcacaggagagcatccgtttctcggctagtgccggaatcgcctttccgacacgggatgtggccggggtcacccgccgtgaggacggcagttatgacgtcaaagtggcgtttctgggcctgcacggcagtcagtcgccgctgccggggtattacctcgacagcctggcgtgggaagaagcccagcagaccgaaagtgtcaccgattttcttaatctgtttaatcaccgctttgtcgcgctgctgcaccggatctggcgaaaataccgctattacatttcgtttgagccggacgggcgcgacccgttttcccgctatatgttcacactgctcggactgggcagtgaaagcaaccgcagccggatccggatcaatcacaacaaaatgctggcttacgccggattactggcaagccccgggcgctctccggatgtggtgtgcagcctgatttcccactgttttgatctggataacgtgaatctgtccggctgggaaagccgccgggtaccgattgcggacgatcagcaaaaccggctgggcgaaatcctgtacagcgccagccgcaccgcgcagccgcgtaccctgctgggtgagaatttcagcctcggtgcacgtatagaagactgtaacggcaaatgcactatcgaaatcagtgagttatcactgacccgttacatgcgttttttaccgaacggcccggattatctgccgctggtcgcttttgtgtcttacatcatgcatgagcagctggcctgggatttacggctgcggatggcggaaaaacaggtcggcgggatggttctcggcgagaaagataacaaccaactgggctggcggagtttcctcgggcaaccggagctgaagccttttgtgacgatttcagtattggaataacataatggataaaccacaacttaattttcatttagtcaacagtaaccggctggaaagcggccgggctgctgcggctcagttttcctcacagggcggcaccatcggcagtaacgccgactgcacctggtcactccaggacagcctcggcaaagtcgccggcatccagtgccgcattgtctggcaggatcagacattctgcctgaaaaccctgaccgaaccggtccgtctcaatcagaccgcgatcccccgccacgccggtgctgtccgcctgtcccagggggatatcattgagatcggggaactgcagtttaaaacccatctggccatgactgatgaaccttaccgcgatccgatggccgtggcaccacaggatattgtatctgcaggcagtaacccgctggataacctgatggacacccgcgccgctcaggatgatgccccgcttcagggggatgataccgcaccgaccgtccgtggttcacgcacccgtgacccgttgcaggcactggaaaatgaaagcctgaccaccggcggttcacagacagaaaatgttattcccggcctgctggccgatcgccgcccggcctcatccgccgccatgccgctctccgataacagagggaacaccatcgtgcaggaatatatggatctgccgaagctgtccgccaccgatcgcgcggatgaactgctgccggtcactgatgcggatcatattgcggtaaatccgctgatgcacgggctggaagcccatctgccgatgcacaactcccgtcaggccaatgattttctgactgaggtcggccggacactcaaagccgctattgaaggtcttctcgcattacagaaaacccaggacaacctgcgcgacaagcagctgcgtccgattgaggataacccgctgcgtctgaacgtggattatcaggaagccctgcatctgctgttcggcgatgagcgcagcccggtgcatctgtcaccgacagccgccgtcagcgagagcctgaccaatatgcaactgcattaccaggccaatctggaagcgatttccgtggcgctggataccatgcttgacgctttctcaccggagcggctgctggcccgtttctctcagtatcagcgggccggggaagaatgcagttcagatccggcctgggcgtggcagatgtatgtcagctactaccgcgagctgaaatcctgccgccagcagggctttgaaaaactcttttatgaagtttacacccatgcctatgaccgggcattacgtaaaggcttataagggacatccatcatgagtgtgaaactgcgatacggattgttgctgctggtactggtgttaagcggatgcagcaaatcctgggaagcgaccaaaaaagtcggcaaggtgctgtgggatccggatattccggtgggcaaagcgaaccagcagccatctgaaattgcgatcacactcctagcggagccggatatgaacccgaatccggacggagagccgtctcctgtggagatgcagattgtgtatctcagcgaggactcccgctttgaatcgatggatttcgaccagctggatgacaaaccgctgccggatgtgctcggtaaaaactatatcgatcaccaggattacacgctgacaccggatcagtacaaaccgctggcgttactgcggacctccggcgagaaccgctatctgggagtgattgtccgttattcggatcctaacgtcactgaatggaagaaaatcatcaagttaagcgggatcggacggcagtattacatcctggttcatgtccgggcaaatgaagtggaattgcgcaaagaggaagaagaataatatgtcgatgaaaaaccgggttatctggcgcgaaggtctgtttatcaagcctcagcattttcagcagcagcagcgccaccaggattatgtgacagagagtctgctctctgcgttcttcggccactatgccggatttacctctctggtgatcaacgaagatattctgcggctgggccgggtcggtatatcagaggcaaccggggtcatgccggacggcaccctgttctctatgccgtcacaggatgaactgccgccgccgattgatatcacgccgctcaatgataccggcaataacattatttatcttgctctgccactacacagtgccacagtcaatgaaattgcggccgggcataacaatcacctgacggcgcgctataaagagttccgtctggatgtccgtgatctgcacaccgaaagcggtgatgtcagtatgctgaatgtggcgagactcagcccggtgctgaaacagggtgccgcggagctgaatgcttatgtctccgttcctgtctgccgcatcagcgaacagacggcagacggcggcctgatccttgacgatacctttattccgtcctgcctgaatatccgcctgtcgccgtcactgaccggctttctcgatgaactgagcggcacactggctgagcgcgcccgccagctggccggacggatcggctcaccggggcagcagggtattgccgatgtggcggaatttatgatgttacagcttctgaaccgtgcatctccgcgttttgctcactttgccgctcaggatgtgctgcatccggagccgttattctgtgaactgcgctcattatgcggcgaactgcatacttttaccgatcagtcacggctggccggacaactgccgaaatataaccaccaggcgctgacagaatgctatccgccgctgatgcgggcactgcgcctggcactgagtgtggtactgactccgcgcgccattgcaattcatctccaggaacaggagcacggcatccgcgtggcgactatccaggatcagcaactgttgcagcaggccgagtttatcgtggcgatccgcgcccagatgccgcaggaacagctgcgccgccagttcacccagcagacaaaagtcacctccatcagccgcatccgtgacctggtcagtgtccagttgccgggcgtacctctgatcgccctgtctgccgcaccgcgtcagctgccgtatcacgcgggttacacctatttccggctggatcgccagtgcaccgcctggcaggaaattcagcagagcggctctgtcgccttccacgttgccggcaacttctcggagctggatattcagttctgggccatccgtaacgggggcgatttatgaccgatgatttactgaccggcggcctgcatgatgatgtgcctgatgacgcgcagtatctgcgtcagcggatgcacaagcagtaccggatcccgctgcgcggggaaaatatcaatccgatgattgatgcggccaccccgctgctcggcatggtcatgcggatgcatactctgtccggctcaccgctgccggacaagctttaccagcaggtggtgaccgatattcaggctatcgagcagcagttacagtcccagggctatgagccgggtgcaattgtctccttccgctatgtgctctgtacctttattgatgaaaccgcgctgggtctcggctggaacacagacaacggctgggtgaaaaaatccctgctggtgcatttccataatgaatcctggggcggggagaaagtgttcattcttattgaacgcctgctcggtgagccgaagcgctatctggatctgattgagtttatctggctgtgcctgtgcctcggttaccggggccgctataaagtgacgcagggccataacgatgaattcaaccgtctgctgcgccgcctgcaaaaacagatccgccagctgcgccccgaacagggctctgttgtgctgtatgaagataccgcctctgacccgcaccgttaccggctggggaaacgcctgcgcctgaaatatatctttatcgccggtctgttgctggccgccggtatttacggtctgtatctgtcgcagctgaataatcagacacaacatattttggaacaactcactccgctactgagtcagggtatacactgatgataaatgtcgatctctcaacgctcgttaaccgtcttgatcctgttgcaaaacatgcactggaaaatgccgccgcccgcagtgtcagcgagcagcagccggaaatcaccactgcactgtttttaagcagcctgctggaaaccccgttaaccgatgtgcgggtgatttgccagcgcgccggtattgatcacagagaactggcggacatgaccgcagaactgatcccgccgcatcaggcactgacccagggctatcccggattttccccgctgctgactgagctgctgaaagacagctggctggtcgcctccgccgaatatcaccacaccacactgcgctccggtattgtacttctggttctgctgcagatgccgcagcgctatctgccgcagcaggcctgcacactgctcagcaacatcaaccgcgaacagctgaaacagcagtttgatgagtggacggcgggttcggcagaaagccagtccggtgatttcagcagtcagcctgcgggcagcaataccccggcggctgacagcctgctcacgcgtttcacccagaatatgtcagagctggcacgacagaataagctggatccggttctgtgccgtgataacgaaatcgacctgatgatcgacatcctctgccgtcgccgcaaaaataacccggtcgttgtcggtgagcccggcgtcgggaaaagtgccctgattgaagggcttgccctgcgtattgaagccggtgaggtaccggagaaactgcgcggctgtcagctgcatgtgctggatctgggcgcaattcaggccggtgccgccgtcaaaggcgagtttgaaaaacgcttcaaagggctgattcaggaaatcatcagctccgccaccccgatcattctgtttattgatgaggcacacaccctgatcggagccggtaaccagcagggcggcaccgatgtcgccaacctcctcaaaccggttctggcacggggtgagctctgcactatcgcggccaccacctggagtgaatacaaaaaatattttgagaaagatgcggcactggcgcgacgcttccagctggttcaggtcaaagaaccaactgctgcggaagccgtgattatcatgcgcggcctgcggactgcctatgaatctgcccatcaggtctttattgatgacgatgcgctgcgcgcctcggcagagctgagtgaccgctatctgtccggccgtcagttaccggataaagccattgatgtgctggacaccgcctgtgcacggaccgcgattaacctgacctcgccgccgaaacagatttccgccctgaaaacacagttgcaccagattggtacggaatgtgatgtgctggagcgtgaagccctgctcgggctggtggatcacactgatcgcctggccgcactgtatcagcagtctgaacagttacaacagtcactggatcagttacagactgactggcaggcacaacagacattagtccgcgatatcatccgcttacgggcaaaattgctggacaatgcagcatcatctgacgaaccggcaccggaagaacccgcagagacaaacgacgcaccggcacagacagataccgcagctgaaccggcagagacagacgacgccgctgagccggaagctgctgaaccggaaaccacagagagtatccgtgaacagttacaggttctgaacgcagaactggaaacccgtcagaaactctcctccctggtgtcgccgcatgtcggcaaaaaacagattgccgaagtgatcgccgaatggaccggtgttccgctcaaccgtctgtcacaggatgccctcgctgtggttaccgaattaccggcttaccttgaggaatctatcaaaggccaggatctggcgattgcgcatctgcacaaacaccttctgaccgcccgcgccgatctgcggcgccccggccgtccgctgggggctttcctgctggtcggtccgagcggcgtggggaaaaccgaaacggtattacagatagcgcagctgatgttcggcggcacacaatatctcactaccatcaatatgtccgagttccaggaaaaacacacgatttcccgcctgatcggctccccgccggggtatgtcggctacggcgaaggcggtgttctgacggaagctatccgccgcaaaccttactccgttgtgttgctggatgaagtggaaaaagcccatccggatgtactgaatctcttttatcaggcttttgataaaggggaagtggctgacggcgaaggccgtgtgattgactgcaaaaacgtcgcctttttcctgacctcaaacctgggtgacagcacgattgtcgcttatgaaaaccggcctgatgaactgctggatgcactgtatccggaactgacggcgtttttcaaaccggcattgcttgcgaggatggaagtgatcccgttcctgccgctcaatgacgaaacactgacacggatcatccgcttcaaactcggccagctcgaaacgcgtctggtacagcgtttcggcgcacaggtcactatcagtgatgctgtttataaggccattattcagcgcgccaaccgggctgagaacggcgcccgtattctcgaatcggtgattgacggccacttactgccgccgctgtctctgctgctgctgaaacacaccgccgccggaaaaactatccgccatatcacgctgtcggcgactgatgaggaattcacagctgaggtggatgcggaataatgagaaaccgactgaaaaatgcgctgtcactgatggactgccagaccaccgaatctctgatatcgcagtttctgccgcactgtttttcccgcagctccctgagcgcactcgctgttgtggtgctcagcccgcgggataaccggctgctcagttactcggtcgattacgcgcaaccgcaggtcaccaccggtctgctggatacagacgcctcggatatccgccagccgctggtacaggtgacatttaaccggacaccgctctgctggacaaatctgtcacagggcagctatctcgaggaatgcaccctgaaaacgtttatccgcgggctgccggcgaataccggtatccacggatttccgttctgtgaccatgagggcaaacccgccggggctatctgccgcctcggcaccgggcttatccgcacagaacacgaacggggcatgacggctatctattaccggattttttgtcatcacttctgcacgctgacccgccggatgcagatccggatacagaaccagcaactgcggggattgcttcagctggctcaggaaaaggagcgcagactggaagcgatgatgacacagaccatggtgacaccggcaccggtgcagtcatccgccccggacctgtcggggatcagggatctgactgccgccctcgaccggtatgaatctgacattctgaactaccggatgcaggcggataaccacgacctgaatgaaatcgccgggaacctgaatatgtccaaacgtgcactggtgtataaattaaaaaaatacggatacatatcatgaccaaaaggatccttcagagcgtgaccgccctgctgatactgacaccgctgtggggcacggcacaaccggcttccccgctttccggtgaaatgtcagcactgctggacacctgccgcaaagagcagtctccgctgatacgtctggactgctacgacaacatcggccgcgaaaaagcagcgccgcagacagagcaggctgcgaaaggtgatatctggcgccgggcggcagctaatgaagagaaacggacagaacatactgtcaccttcatcaccacccagccccgcgaaggcacctggcctgtggtcatgactgctccggctatcggcacacaaccgccccgcccgatcctgatgctcagctgtgtggataacatcacccggatgcagttggtcatgaacaccccggtgacaacccgcaccatccgtttatccaccccgcagacctcattcagcagcgactggtttatccgcgaaaacggctatgtgctggaatccagccggggcctggccgggatcgatgaaatcaaacgcattatgaccggcgataaactgactatcacgccggaaaacggggaaccggtgacttttgatctgtctcagctgacagaaagtatcaaacctttacgtgcggcctgccgctggtgaatagcatgatagcgacacgttttaactggtctgaacaactgctcgccccgcttgatcccgggcagataagcagtgctgtcagtgacagtaacccggactgggaatatatcgacagcgaaatggttaaattcggctccctgactcacgcctcactggatattgaggctattcagtcgcggatcctgacactgctctccgccaccacaaaagatttccgcctggtggtgcatctgctgcgaaccctgcagcatgccggaaatgcagaggaagtcgcgctcggcgcacaattgttctctctgttctgccgtcagttctggcacagctgttaccctgaaaatatcaggctcaaagcccccctgacgcaacaggttttacagcgctttgagctggcacaggataatttcacccgtcaggccaccaccgcacagcgcgatgatgtcctcggggactttgccggactggcacagttctggagtgaagaccatcaggcactgtcacaaaaactggatgacctgagccggggttaccgccgcattgaaaacagcacaccggatgatatcactgcctccgcacatccggcggcggacacagcgaaaaccgggccgtctgccgatccggcaccgcgtgctctgcctgccgcagatgcagaaacagacactgactttccggcggcagacattgacagcggcaatgaccgtacccgcaaaacagccctgctgaatgccgcagatgccctttgccgccgcgcgcctgaaaatgccatcggctatcagctgcgccgttatgccatctggcacaccattcagtcagtaccgtccgccgatgcctccggtagaaccccgctggcggctgtttccgctgaccgggttaccgattaccgcaaacagctgacacaggctgacccggtattactggctgatattgaacagagtctcagcctcgccccttactggctggacggccattatctggccgcacaggccgcacaacagctggggctggatgcggttgcacaggctatccgccgctgtgcatcggaatttaccatccgcctgccgcaactgaccaccctcancccccccccctgccgcaactgaccaccctcagtttttccgataaaaccccgttcgccgatgctgacactctcgcctggctgaacaccacagacgccgccgccaccggtatcagtaccggcggtatacaggccgatacggatgagatcacccgctgctgccgggaaaacgggctggatgcggcactacaaaaaattgatgacgccataaaccgggctgaacagctgcgtgatcgcgtctgcctgcaacttctggccgcctctctgtttgaacagtccggcatgacggggcttgctcaggctcagtatcagcaactgtatgacatcgtatcacgcagcacagtaacgcagtgggaacccgctttactgcaacagcttgccggaaagcttccggagtccgatttcagaaggaataacgtttaatgaaaaaaccatccttatcatccgtgaatgcacagggtctgatcagaaaatggtttaaagccgacaaacccagactcaaatcggcatgggctgtttttctggccatcattccggcgctgatccttatctggatttggatctggggtgcggatttccgcttccgtgatgactatccgctgcgtccggtcagcgcccgctggctggcgaccctcggcctgttcctgattgttatcggctgggtgggatacaccgcccggcggcgtgtccgcgagctggaaaaactgaaactggatgttgagctggctgtggcagacccggtccgcaaagatattgaatttcagaaccgctatctcagccgctggctcagcgaactgcgccgccatctcggcgacagcggccattctctctaccagcgcccgtggtatctggtgctcggggcagagaacagcggcaaacataccctgttttccgccaatctcggcctgctggatctggtaccgcaggaccggatcatctcagaagacggtatcggcctgcatgtccgctgctcactgaccgataaagcggtgctgctgatgccgcgcgggcacctgatcacccagccgcatgaagacagcgaaaaaccgcagctgtaccaccgtctgtggaacagcctgcttgagcgcatggtggcagaacgc

SEQ ID NO: 100 - DNA, 258 bp, unknown
  Altogen 322075 strain
tatttaaactgaccgaccggtgcaggattaatatcatgccagccgacgaaccgaccgagtcttttaccggaatctaatattttattaccgcgatcatcatatacaataatcccatgagccatattaataccccgatatatcaccaataatgaccgtcagccggttattgtcatatactttaataccgcccgctgtaataccggtaccgtttgttgttgttccgtcaaagaactcaaatttattagcctttgcatccag

SEQ ID NO: 101 - DNA, 6099 bp, unknown
  Altogen 322075 strain
  misc_feature (843)..(843): n is a, c, g, or t
tttgatgtattttgtcccgtttttttatatatccggataacggaacagacatattcatcaaataacgataacgccgcgcggtttcatatttccgcgtgtgaccgcgttatttttaatatcaaaaaagcagaacgtaatataggaaataacatgactttgaataaattagcattagtgctgggctttggtatgtctgtggttgcaggtgcggcatctgctgctgatcagggacacggtactgttaaattcaccggttcaattattgacgcgccttgctctattacgcctgataccgaaaaccagactgttccgttaggccagatctccactgccgcactgaaagacggcggccgcagtaattcccgtgattttaaaatcgcattagagaattgcacaacagaaacctacaaaacggtacagaccactttcaccggttctgaggcggctgatattctggccggttccctgggtattgaggggattgccaaaaacgcggcggttgttattactgatgcgggcggcaaacagatcaaattaggtacccctagcgcggcacaggctctgcgtgacggtaataacgacctgaacttcgcagcgtatttacagggttctgctgctgaagccgctgttccgggtgacttcactgctatcgcaacattcgcattgacttatcagtaattaatgccggcacggctcagggatgaaccgtgccgcttttcagttgcgtgcgttcagcggaggcaggaaatggtgagcagaatcatccctcagggagtgctgataacaatagtgtgtttttcctcttatacagcggcaggggaaacgaaacaggatgcaaaaaanaccagcctgcgtttcggcgcggtacggatgcagggcacgatcctcgagccggtctgcactatttccgtggccagccgtgagcaggcagtggcactgaccgatgtttccgttccgcagctgcgtgatgagggacagggacccgcagactacttctggatcaggctggcggaatgcaccgtgcagccggtgaaaggcggtgcggcggataatctccgtttccgggtcacgtttgagggggctgaacaggacggacgttttcagctgaccggctccggcaaaggggcttccttatcgatttcagaccgcaacgggaatgaggcggttcccggcaaacccttaccgcccgcagatattgatctcaataatatggcgctgcgatatcaggcgcgtctcgtgaaaaacagtgatgaacttcagtccggttattaccgggcaacagtgggtttcaagctggaatattattaaaccgagctgactggatccattatggtaattccgctgagtaccgtctcccgccggagactgacagtgctgatttcattaattctgaccggtatcccgcaggcagcttatccggataatcaggatgttgaatttaatactgatattcttgatgtaaacgacaaacagaatattgatctgtccgatttttcccgtgccggttatatcatgcccggcacctacgacttttttatccggttaaataacagtgagttacctgacagttatccggtctcttatattgtgccgccggatgatccgaaaggcagtgccgcctgtttatccccggagctgatggcgcaggccggactgaaaccggaatgggcagagcgtctgcgctggtggaataacggcaaatgcctggataccgcgtcactgccgggtatgtcggtgtcaccgaaactggcggacagcgagcttatcctgacactgccgcaggcttatctggaatacactgccgctaactgggatccgccttcccgctgggatgaagggatttccggcgtgctgtttgattacaacgtgaatgccggtattaatgacccggcgcacggcaaacagacacagcaggtcaccgggaacgggaccgccggggcaaacctcggggtctggcgtgtccgtgccgactggcaggcgaatctccgccataccaccggttccggggatcgctccgaacataactggacatggagccagacttatctctaccgggcggttgcctcattacaggcaaaactgacgatgggggaaaccttctcgcgctcggatattttcgataacttccgctatatcggggtcaatctggccaccgatgacaatatgctgccgccgaatctgcgcggctatgcaccggaagtgacgggtgttgcgaaaaccaatgccaaaattaccgtcagtcagcagggacgggtgatttatgaaaccctggtcgcgccgggaccgttccgtattcaggatattaatgatgcggtcagcggcaaactggatgtccgtgtggaagagcaggacggctctgtgcagtcgtttcagatggataccgccagtattccttacctgacccgtccgggccgggtgcagtacaaactcgccgccgggcagccgtcggaaatcggccgtcacgggaaaggccctgtctttggtatgggggaattctcatgggggatcagtaacggctggtcattatacggcggctccctcgttgccggggactataacgcagtttctcttggtgttggccgtgatttgatggccttcggggccatctcttttgatgccacccagtcttttgcccgtctgccgcaggaagacaaacagtatcgcggcggctcataccgtctgagttactccaaacggtttgaggagctggacagccaggtcacgttcgccggataccgtttctccgagcgcgactttatgagcatgaatcagtatctggatcgccgctacagcgataaccgcgcggataacaataaagagctgtacaccatcatgttcagcaagcagttcccggatatcgggctgagcacctatctgaactacagccaccagacttactggaaccggccggataacgacaactataacctgtcgctggcgaagtacatggatatcggcagttataagaacatcaatatcagcttatccgcttaccgcaataaatatcaggataagaatgatgacggggtgtatctcaatatcagcatgccgctgggggatcgggccacggtcagctacaacagcatgatcaaccgccacggtaattctcataacgtcagttattacgaccgtccggatgataacaacagttaccgcctcggcaccggtctgagcagcaacggcaaagcctccgttgacggctattacatgcattatgccgacagcgcgctggtcaccgccagtgccggacatattgacggggaatatacctccgcatcgctctcgcttcagggcggggtcacgatgacaccgcagggcggggcatttcaccgcatcaatatgccgggcagcgcccgtctgctggtggataccggcggcgtggcggatgtgccggtcagaagcaccggggcactcagctataccaaccgcttcgggaaagctgttctgccggatatgaataattacttccgcaacagtgccgccatcgatatcaacaaactgccggaaaatgcggaagcacgtcgttctgttcagcaactgacgctgacagaaggcgccatcggctaccgtcagtttgatgtgctgtcaggacaaaaagccatggctgctatccgtctggcggatggcagcgagccgccgttcggcgcggtggtgacttcggcggataaccgcgaactggggatcgtcaatgacggcgggcaggtgtatctcagcggtatcaacagcggggatattctgacgctgcggcgcggcagtgaggctgcgtgccggatgacggtgccggagcttgcaccgggacacgcgctgtacaccctgttgctgacctgcggcgcagagccgcaatccgtcccggataaaccgcagccggttgcgctgccgtcttccccgccgccggctgaccgcccgcagcaggggaaatggctgaatatcacaggccgggcagacccggcaccttccacacgtaacgaaatgagtgattcattatgatgtcagttaaacaaacccgtctctctgttctggccgttgccgctgtattgctggcctcagcacagtcgcacgcggctatcgcgctggacagaacccgtgtcattttcaacggggcagagaaatctgtcagcctgaatgtcagcaatctgaataaagagctgccgtatctggcgcagggatggattgaggatcagaacggagaaaaaatttcgtcaccgctggtggttctgcctccggtgcagcgtattgagccgggtgataaaagtcaggtaaaaattcaggcattaccggcgatcgccgcactgccgcaggacagggaaagtgtcttctatttcaatctgcgggaaattccgccgcgcagcaaccggcagaatgtcctgcaaatcgccctgcagacccgcatcaaactgttttaccgcccggaagctatttatgcctcacaaacggatctgactaatccgtggcaggaaaaaatcaccctgacgcgccgtggtgatcactatgaagtccataacccgaccgcatattacgtgacgattgtggatgcactcagcgggttgggcggcaaaagcctggacgggttctccccgctgatggtggcaccgaaaagtcagggcacactcggcctgagtgcagccgctctcggcagtgcgccggtgctgagttatatcaacgactacggcggccgcccgcagttgcagttcagttgcagcggcgcagagtgccgtgtgacaaaaacggctgccggtaactgaacagacaggggataaaccatggatgagcggatcagaaaacagcgtttcctccggcggatactggcggttgtgctctgtatctcagcgggaagtgctgcggcaccgccggagcgggtggccggtatccggggcgtgcccgggatcacctatgtcactatccgcggcaatgttatcgcgccgccgccgtgtgtcatcaacaacggcaataccattctggtggatttcggggaagtgatgagcacccgcattgacggccagcgctacaaacagccggtcaattacacggcggagtgctcaaagatgccgaccaatgctatgacgctggccatcaccggcaatactgccgggtttgatgccgggttattacagactgaaatcgccgggctgggggtgcgcatgctttatcagggacggcagctcaatcccggtgaaaaagtgaagtttacttatccggtctttccggcgctggaagcggtgcctgtccgcgacatgacggcggtactgaccggcggggatttctcggcggtggcaacactggaactggattatcagtaaggagcctgaccatggcaaaacattaccggcggttactgatgctgctgctgtgtgccgcagcgggcagcgcagccgccccgaacatgaagctgtttggcacgctgctggtgccgcccgcctgcacgatcagcgacaacggtgtgatcgatgtgtttttcggtgacaacgtcggcgtgcataaagtggatggcgtcaattacacccgggcggtcaattacaccctggtgtgtgaggataatatcaaaggctgggatctgggattgtcggtcaccggcccgatcagcgggtttgatgatgcggccttgcagacgaatattcccgacctggcgattcacctgacacaaaacggaaagccgttcacgctcaacaaacgcattgcggtatcaccggataacccgccggtgattcaggcggtgccggtaaaacggccgggcagcacactgccggaaggtgcatttgatgtgaccgccactctgctggcggaatatcagtaggagcaatgcaatgaatgaaacagtaaggcgcttttttatcagtacctgcggtgtgtttctgttatcactgccgggtgcggatgccggggcggttcctgacaacctgtattttcacggcacgctggtggatgagccctgcacgatacatccgggggatgaaaccgtggaactgccgttcggcaatatccccgataaaaacctgtacgcctatcagcggacaccctcaaaggatttccggatccggctctcggagtgtgatacctccatcggcaggcgggtgacggtgatgtttgccggggatgagaatc

SEQ ID NO: 102 - DNA, 442 bp, unknown
  Altogen 322075 strain
caggcctaccacttttcactgatactgcgttgcggctccgctcgtttacctcagtaaacttcgcgaacccacgccttgtcccagtaaaaagcaccttttgaatgaaaggtgaaggtgacccgggggaaaccaaataatggggctatagctcagctgggagagcgcctgccttgcacgcaggaggtcagcggttcgatcccgcttagctccaccattatctgatatctgaagaataattcagagtttaccggaaacggtatgctgtgaattattatgctctttaacaatccggaacaagctgaaaaattgtaacaatcaatattatcaccgaggtaatattgatgagtctctcagccgaacgactttgaaagtactcactttcgaggggaagcgagctaaataatttcgcggaggccagcgcacagcaagcggagcatacatc

SEQ ID NO: 103 - DNA, 195 bp, unknown
  Altogen 322075 strain
ggtcagttcaaagataaagctgacagttttattcgctgcaactttggcagtgtcttcatactgtgcactcactgtaacgttatcaaccgcagttgtggtcgatgtcagtgtgacagtggctttaccggtggcatccgttttactgcttgtcgctgacagcacaactgcattgcctttgtcctgcgtccagttcac

SEQ ID NO: 104 - DNA, 455 bp, unknown
  Altogen 322075 strain
cctttgaagaatggagtatgacgaccaccttcatctttgctcagaatataaacttctgattcaaatttggtatgtggtttgattgaacctggtttagccagaacctgaccacgttcgatttcttcacgcttggtaccacgcagcagaacaccgacgttctcacctgcacggccttcgtccagcagtttgcggaacatttcaacaccggtacaggtggtttgcgcagtatctttgatacccacgatttcaacttcttcaccgactttaacgataccgcgctcaacacgaccggcaacaacagtaccacggccggagattgagaatacgtcttcgattggcagcaggaacggcttgtcaaatgcacgctctggctccgggatgtaagaatccaggtagcctgccagttcaacgatcttagcttcccactctgcttcgccttccagtgctttcagcgc

SEQ ID NO: 105 - DNA, 48863 bp, unknown
  Altogen 322075 strain
tttatttcaactttttttctgtttgcagataaaacacccaatcgggttactttttaggtgattttacgcttttttgtacgggtttcagcagtgcaggtaaatcagcgatactgttaatcacaatatctgccgccgcttcagcatcttccgttaccggtttaccggtgcgtaccaatacggttgtacccacttcggcagcccgtccggccagcatatcgtcgagcttatcccctaccatataagagttactcatatcgatcttcaggaatttctgtgcatccagcagcatacccggcgccggtttacggcagttacattcctgacgaaactcttcgacaataccttcaggatgatgaggacaataatagataccatccaggtcaacaccgcgatccgccagagaccagtccatccattctgtcagatgcataaactgatcttcggtaaacataccgcgggcgatacccgactgatttgtgactatgattaaagcgtagcccatctgcttgatggcctgcattgcttcaatcgcgttctctataaactgaaaatcatcaatctcatggagatagccggtatcaacgttaatggtgccgtctctgtccagaaatactgcggggatacccatggttacactcttagtccgtcatcaataatgtatttagtatcgcctatttgatgcggaatgagaatgcggcctgataactaaatcctgttgacttagccgtccagacatcttaacatccgaaaatcatctggtgaacaaccagtttcacgtaacaaggtaataataattacatgataaagctgacgaatataaataaggtttttcagcagggtcatcgcgaaatacaggcactttctgatattaacctgcacgtcccgcaagggcagatttacggtgtgattggtgcttccggcgccgggaaaagtacgcttatccgctgtgtgaatatgctggaacggccgacatccggacaggtactcgtcggcggccgtgacctcactaagatgaacgataaagagttaacccgcgcccgtcgcggcatcggcatgatttttcagcactttaacctgctgtcttcccgtactgttttcgggaacatcgcgctgccgctggaactggatcgcgtaccggcggcggaaattgaaaaacgggttgtgaagctgcttgacctggtcggactgtctgataaacgggatgtttatccggcaaatctgtccgggggtcagaaacagcgtgtggctatcgcccgtgcgctggcaaacgagccggaggtattgctgtgtgatgaggccaccagcgccctggatccggcaacgacccgttcgattctggaactgctgaaagacatcaaccgccggctggagttaactatcctgctgatcacccatgaaatggatgtggtgaaacgcatctgtgaccaggttgcggttatcagcggcggacagctgattgaacaaaatacagtgagtgaggtgttctctcatccgaaaacgccggtggcacaggcctttattgaatccacgctgcatctggatgtgccggaagattatctggcacgtctgaaaccggaaccggcggaaggcctggggccgctgctgaaactggagtttggtggtcagtctgtcgatgcgccgctgatctcgattgcatcacgtaaattcaatattgatatcagcatcctgagttctcagatggattatgcgggcggtgtgaaatttggtgtcatgctggcagaactggacggtaacagcccgcaggatgttgaggcggctattaattttctgaaagaacaccacgtaaaaacagaggttctcggttatgtctgaaggaatgattttactgttagttaaaggcatctgggaaaccctggttatgacatttgcatccggtttcctgggatttttaatcggtctgccggtgggggtactgctgtatatcacccgttccggtcaaattgcggataataaaagtctgtaccggaccctgtccgtgctggtcaatatcttccgcgcgattccgttcattatcttactggtgtggatgattccgtttacccggttagtcgtcggtacatctatcgggttacaggctgccattgtgccgctgactgtcggcgctgcaccgtttattgcccgtatggtggaaaacgccctgctggagatcccgtcaggactgattgaagcatcacgggcaatgggtgccacaccattgcagattgtcagcaaaatcctgctgccggaagcattaccgggactgatcaacgccgcgaccattacgctgatcaccctcgtgggttactccgcaatgggtggtgctgtcggtgcaggcgggttaggtcagattggttatcagtatggttatgtcggatataacgcagtagttatgaatacggtattggcattgctggttgttttggtctttattattcaggtatgtggtgatcgtctggttaaagccgttacccacaaataagactctctccgcgccgcactgactgcgaacgcgtattaaacagaacgaggaaagaaaagatggcttttaaattaaaatcgcttgtcgttgccggtgctttgctgggttcattagtgctggcgggttgcggacagaatgaaaaagatccgaaaagtatcaaagtcggcgtgatcgtcggtgcggaacagcaggtggcggaagtggcgaaaaaagtcgccaaagacaaatacggcctgaatgtggaactggtcacgttcaacgactacgtcatgccgaacgaagccctcagccgtggtgatatcgatctgaacgcattccagcacaagccgtatctggatcagcagattaaagaccgtaactacaaattaacgccggtgggcaatacctttgtttatccgattgccggttattcaaagaaaatcaaatcactggatgagttacaggacggcgcacaggtcgctctgccgaatgacccgactaacctcggccgttcactgctgttattacagaagcagggattaatcaaactgaaagaaggcaccggtctgctgccgacagttcttgatgtggttgaaaacccgaaaggtctgaaactgatcgagctggaagccccgcagctgccgcgttcactggatgataataagatcgacctggccgtgatcaacaccacttacgccagccagatcaacttaacccctgctaaagacggcttatttgttgaagataaagattcaccttacgtcaacattattgtctcccgcgaagataataaagacagtgaagcggtgaaacaatttgttcaggcatatcagtcagatgaagtctttaacgaagcagataaagtcttcaacggcggtgcggtaaaaggctggtaaaagaccgggaattcagaataactgctaagttcttttatctttaatcaaagaatattacactgagggtgaacaattgttcaccctttttattttgttataatcattaaatgttcagcatataaataataatatttcatctgcccttacttttctgttttgtacagccagaggattgttttccatgcgagtgcttattatcagcctgcttgctcttttcatcgcgggatgctctttccgtcagagtcattctgaacaggagcaggcgcaatacgccgatatgcggctgaaaaaaccggccggtaaaaaagccaaatcaacatccgcagcatcacgcgtcaaactctatctccacccggaagaactgctgggtaaacctttccgtgaccttggcgtggttttgggtcagaattgccgtgaagcggcaaaccctgcacagtccggtattccggcagcccgtaagcaaatgctgtcccgggccggaaaactgaaagcagatgccgtgttactccaccagtgtgccgtgaaccccgcgcagggttgtaagcaactggcggtatgcgaaggtactgcgattaaggttgatgatgtctgagttttcattttcgccggtggggtttatccgctcaccgtggcaggaaaaatttgcgattccgcgccagccggggctggttgaggatggtaccggggaactgcactttgtggcgccctataatcacgccgactgcgtgcgcggactggaacagttcagtcatgtgtggatcatctttgttttccatgatattccggccggcagctggcgcccgctggtacgcccgccgcgccttggcggcaatgccaaaatgggcgtgtttgccacccgctccaccttccgcccgaatccaatcgggatgtcgctggttgaactgaaaaaaatctgttacgacggtgacaccgcgtatctctccctcggcagcctggatctgcttaacggcacaccggtgctggatatcaaaccctatctgccctatgctgaatccgtgcccggcgcactggccggttttgcacaggaagagccgccggcggatatgccggtcgtattcagtactacggcacagcaattcataacggctcagaccgcacaatatcctgatttggcgcgttttatcacacaggtactggcgcaggatccgcgtccggcgtataaaaaacaacaggccgacgataaaatttatgccgtgcacctgctggatttaaatgtccgctggcatatccgcgacggcgtgaccgaagtcatcagtctggaaaaacgctaaaccccttttggggcgccgcagtcactggtaaactgtcaggcttaacttcacttctgcgcagaatatttctgcgataagacatgtttgtcgttctaatggaacctaaataatgcgtactacccaatatctgctctctactctgaaagagacccctgctgacgccgaagtggtcagtcatcagctgatgctgcgcgccgggatgatccgtaaacttgcttcaggtctgtacaactggatgccgaccggtgtccgcgtattacgcaaagttgaaaagatcgtacgtgaagagatggaaaatgccggttcactggaaatctccatgccggtggttcagcccgcagatttatggctggagagcggacgctgggaacagtacggtccggagctgctccgtatcaccgaccgcggcgatcgccagtttgttctgggtccgacgcacgaagaagtggtcacggacatcatccgtaacgaagtgacatcttacaaacagctgccgctgaatgtgttccagatccagaccaaattccgtgatgaagtccgtccgcgttttggtgtgatgcgctcccgtgaattcatcatgaaagatgcgtactctttccacctgacccaggattcactgcaggaaacgtacgatacgatgtatcaggcatacagcaaaatcttcagccgtatcggactggatttccgtgcagtaatggcagataccggctctatcggcggaagtgcatcccacgagttccaggttctggcacagagcggcgaagatgatgtgattttctcctctgagtccgattacgcggccaatatcgaactggcggaagcggtctgcaacattactgagcgccctgcaccgcagaaagcaatggaactggttgatacaccaaacgcgaaaactatcgcagagctggttgaacagtttaatctgccggttgagaaaaccgtcaaaaccctgattgttcacggcagcaaagagagcggccacaaactggttgcgctgctggtgcgcggtgaccacgaactcaacgaagtgaaagcggaaaaacacccgctggttgcttctccgctggaattcgcaacagaagaagagatccgcgcagccgtgaatgcaggcccgggttcactggggccggtgaatctgccgctgccggtggtcgctgaccgtactgttgccatgatgagtgatttcggtgccggtgcgaatatcgacggcaaacactatttcggtatcaactgggagcgtgatgctgccctgccggaagtggcggatatccgtaatgtggtcgccggtgacccgagcccggacggcaaaggtaccctgatgatcaaacgcggtattgaagtcggtcatatcttccagctcggtaaaaaatattccgaagcactgaaagcgactgttcagaacgaagccggtcacaacgaagtggtctttatgggttgctacggtatcggggtcacccgtattgttgccgcagcgattgagcagaacttcgatgatcgcgggattatctggccggatgcgattgcaccgttccaggttgctctgctgccgatgaatatgcacaaatcttaccgtgtgaaagaagtggcggaaaaactctacgctgacctgaccgctcagggcattgaagtgatctttgatgaccgtaaagagcgtccgggtgtgatgtttgcggatatggaactgatggggatcccgcataccatcgttatcggtgatcgcaacctcgacagcggtgtggtggaatacaaataccgccgcagcgaagataaatccctgatcgcgctggacgatgttgtcagtgtgctgaaagagaaaatcatcactgcctgattatcagtgctgtgaatacaaaaaggctgaacatctgttcagccttttttatctctgcgggagccggaagaacttactgacagccgcgtgatttatccagtacggatttaccggtctggatcagtgcctgatcaaactggccgtcttccatggacggacggatggtgtaatacccttccacttccagataaaccggtttgccgccttcgacgcccagcttaccgtaaccctgctctaaaccgatattgcccggcaccgcataaaccacgccggtctgacaatctttaaaggttgccgcatccgccatataacgatattcacctttcagctgtaccggtttcaccattttcagggtgtagttcaaatccgatttaaccgggttgccgtcgatatccagcattaccagcgatttatcctgcggatcataataagcacgctgcccggcagtatcagtcagacgcagtttttcgccgtctttcgcccaggtcccggtttcaaagaaggtctggttgccgtcgcgggtttccagataggtgcgctgcataacataggtgccgtcaccttccagtaaaacggtcacatccatgccggtgcaatcggcacacggaaccacgccgttataggcacggtcaagaacatggacttccggcgttggtggcacaaccactgtcgaactacaggccgtaatgctgaaaatgcctgccgctaataagagttttgtcagatttttcatgtttccccctgaacatcagatgaggtaatgttagcaaaatgattgtcagtttttgtatattcacgcgctttcagacaattacgcatttttatttttaaaatggcaatgattttcctcaaaacagtgataaacaatatgttttgccgataataaaatgtaatcagtaatagccaatatgataactatgatatagtctgctgggagcgatgaggctatttgaataaccatccgcggatgataccgcaagcgaaagtatggtgagggaatatgtctgcagaaaacgaatatcaaccaattaattgtgatgactatgacaacctcgaactggcctgccagcatcatatggtactggaagtgaccttacaggggggcgatgttctgacaggaaaagcgaccgatttggtgctccggaagaaagtggaataccttgttgtcacgattgacaacgaactgcgggagcttcgtctggactctattgtcagcttcagtcatcccgacctgggaacagtggttattgatcactcaccgtcctgaataactctgcaaccccgtccgcggggttgtttttttcctgcataatcatcagttttgcctcatccgcttctccctctttcgtgacaaataccccgaccgccgctatcagcgtatcgttataccagagcagcggtgtgcgttcgcgcagccagggcgcaatgccgcattcctgccacagctttttggctgatcgcccgcgatcacgaccgcagatatgataatgcccctgcaaaccaaaacggaccgtcacctgttcatccggacgcggcgggcgcaccacagaaacgctgtccggcggagtgaccgtttccgccacccgcaaaatccctgcatcatccggcagttgcagcacagagtgcagatcccacagcaggcaatagtctgataatccggctgttttttccgtcacatacagtttgttctgataacggcggatggtgaccggtttcagataatagcccggttccgcatccggtttcgccagtgccacttcctgccagagcagtgccagctggtgctgtgacggcatctgcacaccacagcgtttcagccagcggcgcagtatgccgttgcgtttcgccgtcccggcgctgagcagcgggataaaagacaacccgttatccgcatccgttagctgcatgagttccggcagcagcaattcatccagcagagcttcctgttcaccgcaaagcgcggcactgcgggaaaccgcctgagcaaagtgcggccagcgggcattcagttgcggtaataccgcatggcgcagaaaattgcggtcataacggcgatcctgattactgtcatcctcgacccaggaaagttgatggtattgcgcatactgttcgagctgagcacggctgaaggagagtaacggacggatcagcggattggcaccgaatgccatctgttccggcattgcagagagaccggcagggccgctgccgcgttttaaggcgagaaagaaggtttcgctctgatcatccagatgctgcgcggttaccagcgcctcatccggagctatcacttcacggaaagcctgataacgtgcatctctggcagcagcttcgatcccttttttgcggggatccacctgcacgcggcacacctgaaacggaacagagagtgaaccgcagaatgtccggcagtgttctgcccagtcatccgccagcgggtttaatccgtgatgaatgtagactgcccgcaaccgcagcgccggacgctcagtggtctgccactgccgcagagcatgcagcaggacaacggaatcaagcccgccgctcagtcccgccaggattgcctgctgagaggcaaacacacggcggaacacggcagacagtgagtcacaaaaggcagtatccacaaccggttatcagcagtagccgtagctcatcaggcgctcatagcggcgattagccagagactcgctgtccagtttatccagctcttccagatcagacaggatctgtgctttcagggatgcggcaaccgcttcataatcacggtgcgcgccgcccagcggctcagggatcacattgtcgatcagtttcagctctttcagacgcggcgcggtgatacccatcgcttctgcggcgatcggcgctttatccgcgcttttccacagaatcgaggcacaaccttccggtgaaatcacagagtaagtgctgtattgcagcatattcactttgtcgcccactgcaatcgccagtgcgccgccggaaccgccttccccgaccacggtacagacagtcggtactttcagacgggacatttcacgcaggttacgggcaatcgcctcggactggccgcgctcttccgcgcccacgcccggataggctcccggggtatcgataaaggtgatcaccggcagattaaagcgctcagccagttccatcagacgcagggctttgcggtaaccttccggtgccggcatgccgaagttacggcggattttttctttagtttcacggcctttctgatggccgataatcatcaccggacgaccgtccagacgggcaatcccgccgacaatcgctttgtcatccgcatatgctcggtcgcctgccagttcctgaaaatcggtaaagatcagtttgacgtaatccagggtatacggacgacgcggatggcgtgccagctgagcaatctgccaggcacccaggtcagcgaaaatcttacgtgtcagttccagactcttcgcccgtaagcgttcaacttcttcgtcaagattgatatcgagtgattcatcctggcggctgaccgcgggcagcgaatcaattttcgcctctaactcggcaatcggctgttcaaaatccagaaaattaagactcataatgttcctattttagtcaaattctaattctacctgctcattacccagcagagtccgcagatccgtcagaagggtatcggtcggggtgacccgccaggtggcaccgaaacgcatccgcgctctggcatcgtccttctggtaataaaggtgaaccggtattgtcccggagcggtgcggttcaagcgcaccgcgcagccggtgcagcagttgttcgtcaatttgcccgtccgtgagcgagatagcaagcccgcgcgcatatttttcgcgtgcttcgctgatatccagcagctccctgaccaccattttaaccccgccgctgaaatcatcaaagctgacctgcccggaagcaatcagaatgcgatcctgttcgagcagatgctggtaacgttccagtgcatcggaaaatagcataatttccagccggccggaacgatcatcgagggtacagacaccaatccggtttccccgtttggtggtgatcaccttggaagccagcaccagaccgactaccgtggtcatctgaccacgcggtgtcgggttaacatctttcagacgtaaaccatgagtatagcgctcaatttccttcagataacggtttatcggatgtccggtaagatacagcccgagtgtttcccgctccccttcaaggatgatttcgtcctgccatttcggaatattggcataagagcgctctacctgctccggtgcctccgccagtaccccgaacatatccgcctgaccgatggcttctgctttggcatgctgatccgcggctttcagcgcatcctccagtgaggacatcagcgcggcgcggtgcggccccagccggtcaaacgcgccggacataatgagtttttccattacgcggcggttcagttttttggtgtccgtgcgggcacacaaatcaaaaatatccttgaaatacccgtccttacgggcttccagaatcgcttcgatcgggccttcaccaacacctttaatcgcaccgataccatagactatctcaccttcatcattgacatggaagtgatacagtccgctgttgatatccggcggcagaactttcagacccatccgccagcattcatccaccagcccgacgactttttcggtgttatccatatccgccgtcatcacagcagccataaattcagccggatagtgtgctttcagccacagtgtctgataggaaaccagcgcgtaggcagcggagtgagatttgttaaaaccgtaaccggcaaatttttccaccaggtcaaagattttcatggacagctcggcatcgacgccgtttttcactgcgccctcttcaaataccgagcgctgttttgccatctcttccggctttttcttacccattgcacggcgcagcatatccgcgccgcccagggtatagcccgccagcacctgggcaatctgcatcacctgttcctgatagaggatgatgccgtacgtcggttccagtaccggctgcagggattcatgctgccattccacatccgggtaagagatagcctcacgtccgtgtttacggtcgataaagttatccaccatgcccgactgcagcgggccgggacggaacagcgccaccagggctatcatatcttcaaagctgtccggacgcagacgtttgatcagatccttcatgccgcgggattcaagctggaaaaccgctgtggtttccgagcgctgcagcatatcaaagcttttctggtcgtcgagcgggatagccgcgatatccaccggcggcttgccttttttctcattgcgcgggttaatcatgcccagcgcccagtcgataatcgtcagtgtgcgcagaccgaggaagtcaaacttcaccagaccggcatattccacgtcgtttttatcaaactgtgtgaccgggttattcccttccgggtcgcagtaaagtggtgcgaaatcggtaatttttgtcggcgcgatcaccacaccaccggcgtgtttaccggcgttacgtgtcaccccttccaggatgcgcgccatgtcgatcagcgccctgacttcctcatcggcctcatacacctcgccgagctgcggctctgccgcgaaggctttttccagtgtcataccgggatccggcggcaccagtttggaaattctgtcgacaaacccgtacggatgccccagtacacggccgacatcgcggataaccgcttttgccgccatggtaccgaaggtaataatctgggaaacggcatcacgcccgtacatttcggctacgtgatcaatcacgcggtcacgtttttccatgcagaagtcgacgtcaaagtcaggcatggagacacgttccgggttcaggaagcgttcgaacaggaggtcgaactccagcggatccagatcggtgattttcagggagtacgccaccagtgaaccggcaccggaaccacgacccggtcccaccggcacattgttatccttcgaccactggataaactccatcacgatcaggaagtagccggggaagcccatctggttaatcactttcagttcaacatccagacgctcgtcatattccgggcggcgctgcgcacgcacttccggatccgggaacaggaacgccaggcgctcctccagtccttctttcgagcgtttgaccagataatcttccgtgctcatatccccggtagggaactgcggcaaaaaatactcgccgagacggatggtgacgttacaacgcttagcaatttcgacgctgttctgcagtgcttccgggatgtcggcgaacagctcgcacatctcgtcctcactgcgcagatattgctgagggctgtagagtttcggacgtttcggatccgctaacgtataaccatcatgaatggctacgcggatttcatgagcgtcaaaatcctcactgctgataaagcgaacatcattggtcgccaccaccggcagggatttctctgtcgccagttgtaccgcagcatgcagatagctttcctcatcctggcggccggtacggattagctccagataaaagctgtccgggaagtgggtctgccagaattccagcgcctgctccaccaggacattattaccgcgcaacagaaacttacccacatcacccttgcgcccgccggagagaataatcagcccttctttatgattaaccagccagtcgcgctgaatggtcggtccctgtgcaccgtagcctttctgataggcttcggagataagcagggtcaggttctgataaccggtattattgcgtgccagaatcgtgagtgacgccagttcatcacccagcagctcgctttccatcaggaaatccgcgccgacaatcggtttcaccccggcgccgtgcgcactgccgtaaaatttaaccagcccgcacaggttagtgaagtccgtaatcgccatcgccggcatattcatcgacgccacttttttgaccagcggtccggttttcgccagtccgtcaatcatggaatagtcgctgtgaatattaagatgaataaaacgcggttccgccattacgccatcctcacttactgataccggccagcgcgcggcggaccgggccaaaactggtgcggtgatgctctgtcaccccatactgcgccagcatctcaagatgcagcgccgtcgggtaacctttgtgttttgcaaatccgtactgcgggaattgtttatccagctccgccatttcgcgatcccgcgtgacttttgccagtatcgatgccgcactgatctcaggcaccagaccgtcacccttgatcactgcctgagcagggacaccaaaatccggcgctttgttgccgtccaccagtacaaaacccggacgcaccggcaacccggcaaccgcccgctgcatcgccaggaatgtggcctgtaaaatattgatttgatcaatttccgccgcttctgcgcggccgatactccagtacagtgccttttcctgaatttcagcaaacaggcgctcacgttttttctccgagagctttttggagtccgccagaccttcgatcgggttctgcggatcaagaataacggcagcggttaccaccgcgccgaccagcggcccgcggccgacttcatcgacaccggcaatcagtgccgcgtccggataaacaaaatccattaattactcgctatatctgatacggcctgtgccgcctgattatccgcatcaagacggattttctgatggagttccaggaaggtttctctgagtttatccacggcttcaccaccctgcaacagcggcagcagtgcatttgccagcagatcactgcggcactcatcctgtaacagttccggcacgatttcacgccctgccagcaggttcggcagtgacacatacggggttttgaccagccgtttcgccagccagaacgtgaacggcttcatgcggtagccaacgaccatcgggcatttcgccagcatacactccagtgctgccgtgcctgacgccagcagtgcggcatccgaggcaatcatggcatcccgggcgcggccgtcaagcaggtgcacatccagttccggggcaatttcctgtttgatagcttcaaactcagcccggcgtttggcattcaccagcggcaccacaatctgtaaatccggcagtgcctgccgcagcagttgcgcggttttcaggaagtcgccgctgagcatcgagacttccgcgtgacggctgcccggcagtattgccagacacggcgcggacggatccagccccagcgcgtcacgggcagcggttttgtccggctgcaacggcagtgcatctgccatggtgtggccgataaagcggcacggcacattgtatttgtcgtaaaacgctttttcgaacggcaggaaagccagcaccagattggtcgctttggcgattttaaagacccggttctgccgccacgcccagacagacggactgacatagtggatcgttttgatcccggaagactttaaccgtccttccagggtgatattgaaatccggcgcatcaatgccgacaaaaacatccggcttcagttcacggaagcggcgggtaagatcacggcggatggagagcagacgcggcaggcgccccagcacttccacaatgcccatcacggccagttcttccatttcataccaggtttcacagccttccgcctgcatcagcggaccggcaaccccgaagaaacgaacatccggatatttttctttcagtgcgcgcattaaacctgcgccgagaatatcgccggaggtttctccggcgacaatacctatcgtgagcggacgaggtgataccgacatggcagcccccgcaattacggacggatgatcccgcgttcagcggtatccaggaagtcagcgaaggtttttacatggacattttctttcgccagttcagccaactgcactttggcttctgccagcgtcagattactgcggtacagaactttataggcattctgtaacgcactgatatcgtctttatcaaaaccacggcgtttgaggccgatagcattgaggccgaaggcggtcacatggttaccctgcgcgattaagaacggcgggatatcctgcgccacacctgaacagccgccgaccatcacgtgctcaccgatacggcagaactgatgaacagccgataagccacccaggatgacataatcatccagcgtgacatgacccgccagggttccgttgttggcaatgatacaatggttgccgatcacacagtcgtgagcaacatgggcattgatcatcagcaggttgtcgttaccgatacgggtaacgccggtgtcctgcgcggtgccgcgatgaatagtcacactttcgcggatacggttacgatcaccgatttcaacgcgggtcggttcacctttgtatttcagatcctggtttatctcaccaatggaggcaaactggaaaatctggttatcacgaccaattttggtatgaccattaatcacaacatgggacttgatttcagtcccctcaccgatctcaacatccgcaccaatacagcagaaaggaccgatggtgacattggcaccaataacggcgccgtcttcgataatggaagacgggtggatccgggcggttttatcgatcatttattacccctcacggcggcgtgcacacatcatggtagcttcgcaggcaacttctccgtcaactttcgcaacacccgtgaaacgggcaacgccgcggcgttccttatggaaagtcacttcgaggatcatctggtctcccggcagcaccgggcgtttaaagcgacagtcatcgatggcggcaaaataatacagttcacccggctctaatttacccaggcttttgaacgccagaatgccggtggcctgagccatcgcttccagaataagaacgcccggaaaaatcggtttgcccgggaagtgcccctggaaaaacggctcattgaatgatacgtttttcacggcacgtaaaaatttaccttcttcaaaatccagcacgcgatccactaataaaaacggataccggtgcggaagaagctctaaaatttcatcaattttgagagtatggttgtcactcatcagaatactcttcctgtctctttgtcatatgtcttattaataacacggcctgctatacccgtcacgcggttagcaggccgcaaaaataccgcaaaatgcgttgttatttatcgtcgttatccaactgccgctcgaccgccttaaggcgtttattcatttcgctgatgttcatcaccagcgcggcagttttacgccatgttttatttggctgtaacggaataccggaggagtatacacccggttcggtgataggccgcattaccatgcccatgcctgtcacgacgacgcgatcgcagatttccatatgaccattaatgacgcttgctccgccaatcatacagttgcggccgattttcaggctcccggccataatcacaccaccggctactgcggtgttgtcgccgattatgacgttatgggcaatctggcactggttatcaatgataacaccattaccgattaccgtattttctaatgcaccacggtcgatagtggtacaggagccgatttcaacccggtcaccgataataacggaacccagctgagggattttaacccactgaccgcgatcgttggcataaccgaatccgtccgcaccgataacggtgttggaatgaaccaggcagccttcgccaatcacgatcccgtggtacacggtaacatttgcccagatacgggttttggcaccgatagtggtatttttgccgacaaacgatcctgcgccgatgataacatcgtcacccagaaccacgccggactcaatgacagcattcgcaccgaccgacacattggccccgagagaggctgacgggtcaatcacggcagacggatggatattctcagccggagccggtgtggtatccataatctgcgccatatgcgcatacgccaggtacgggtctttcaccacaagggcagcgacctgacaaaacggtaaatcgtcttcacgcaataccacagcacccgcctgacaaccagccagtttttcccggtaacgggcatcagacagaaaggtaatttgcccgctgtttgctgaatgcataggcgcgataccggtgatgacgagatcgccatcaccgtgtaacgttgcattcaactgctgagcgagatcagctaatcgaatggaagacattaattatttaacctgtttcagaacgtcagcagtgatatcaatgccggaaacagagtaagcaactgcgttagcatcgatcacaacgtcatatccgccttttgaagcaacagatttcactgcatcttcaacacgcttcatgactttgttgcgctcttccatctgacgtttctggaaatcctggtcaaatgcctgggcttttttcgcgaagtcagcacgtttggtgtcgaattcacctgccagtttctgacgctcgctgtctttcatggtcgcgccgtctttctgcagtttctgagcacgggtctgcagatctttttctaaactctgcagttcagtaccacggcttttgaattcgctttccagttgttttgctgccgcttcacggcccggcattttctggacaacttcaccgatattgacaaccgcgatcttgtcagcagcctgagcagcaccggcagacatcgctaataccatacccacgctggcagcagttaataactttttcacaataaaaccccttaaacaccatttactggttggatattaaacccaatggtaaagattccctttgcacactgagcgtactggttattacgcatggtaaccctgtactgcaattaccaggtcttaccgatattaaactggaactgttctgtccggtcaccctggtagtctttgattggcttcgcataagagaagaccaatggtccgagcggagaaatccactggaacgctataccggtggaaacacggatgttcccgggactactgtaatcaggaatacccggataggttgagccatcccagttggtatcccacactgtaccggcatccacgaagagcgatgtgcggacagaattcgtatatttttcatcgataaacggtgttggtgtaatcagttccatactggccaccgccatcgcattacccccgatagcatcgcgggatggctgatcactcttcacctgaccgctttcattcagataaactgctttcggaccgatggtattcgagcggaaaccacggacagtaccggagccccctgcatagaagttctcatagaacggcagttctttgccgccgagaccatcaccgaagcctaaacgaccgcgtcccatcacaacccagctgccgttttcgtcaaccggataatagccggtggtatcggcgatcagtttatagtattcgttatcagaacccggaaccgtgactttcgcactcacagtggatttcacaccggaagtcgggaagtaaccacggtcgaggttgttataaacccacgcggttgtcagggtaaagtcatcagcacggaattccgcacgctctttataacccggataatcacccatcgagttcagataacgccacatggcaacctgcggttccatacgggacagggtgttatgcacataacccagacctaaacggatagagttattttcgttgatcgggaagccgagcgttccgtccacaccataggttttgttggtgtaaccggacaagtccgcgtcatccgcacggaaatcgttgtagaagatacggccgccgaggctcacaccatcaaccgtgaagaacgggtcagtcagtgacagttcagcgtacgttgagtagtcgttcttactggcgttcgcaccaacctgataaccggtacctaaccagttatcctgggtgacacccacctggaagctgacgccgctctctgtaccgaagcccacaccaaagttcagggaaccggtgttacgctctttgactttatagacgacatcgacctgatccggcacacccggcacacgctgggtttccacctcaacggtttcaaagtaaccggtacggttcagacgctctttaccggcttcaaccagatcgttacctaaccatgccccttccatctgacgcatttcacggcgcagaacggagtctttactcacgtcgttaccggcgaaacggatctggcggacatagaaacggttaccggcatccacattcacatgcagaaccacggttttatcggcttcattaatttccggctgggtcatgacgcgcggatacgcatagccgtaacggccgagcatatttttgacatcattctccattttggtgacctgagcaccattatagagtgaacccggctcaatggcggtcagctcggtgatttcagcggagtgaccggccgtttcacccgcaacctgaaccccggcaatctgatactgatcgccctcggtcacgttgatggtgatatagataccttttttgtccggcgtcaggctgacctgagtcgaatcaatattgaatttcgcgtaaccgcgatccagatagaagctgcgcagggtttcaaggtcaccggccagtttctgtttctggtatttctggtcagccgccaggttccaccacggtacgtcatcacgcagctggaaacggttcaccagttcagccgtggtaaactgagtgttaccgacgatattgatctgctgaatagtcgcggatacaccttccgcaaagacgaatttcacatcaatacggttgcgcggcagtggtgtgacaacggcttttaccgtcgcgttatacttaccgacactgtgatagaaatcttccagccccttttcaatgtttgacagcatcgtccggtcaagggcttccccgacgcggatacgggatgcttccaggttctgtttgagcatgtcgtccttcacggatttgttacccgagaaggtgatatttgcaatggtcggacgttccttcacctgaaccagcagtacattaccttcacgcaggacgcggacatcttcaaagttacctgtcgcgaacagagcgcgaatggtacgtccgatatcctcatcactggccgtgtctccgacacggacaggcatgttcagtaatgcagcaccaacggcgacgcgctgaagaccttcaaactgaatgtcctgaaccacgaatccgtctgaaccgtatgcagtgaagctgccaagcagcagcgacgctatgagcaactttttcatcgccatcgttgttatgcgttttccttaccggtcccggtcttccttaatcagaagcgggagaaatcattgaaaagtgcaagccccatcaacagtaccagtgccattacaccaatacgataactgaagtcttgtacacgctcagacaccggcccgccttttatcttctcgataagcaggaataacaggtgtccaccatctaaaactggcagcgggaacagatttatgatccctaaattgacgctgatgagcgccagaaacatcagataatacactaagccggaatcggcggaaataccggcacctttcgcaatcgataccggaccgctgagattattcagttttacatcaccggtcaccagcttgccgatcattttcacggtcagattcattaactgccaggttttcccggttgcctcggcaaccgcttccaccggcccgtactgatgttccgtaatatactgcgggtcgagcggaataacctttaattcgacaccggcaaaaccaatttgtttactgccgccgctgttttttatctccggtgtgagaggcacattaatatgttctccgccccgctcaatcagtaaatcgagcgttttaccgggactattacgtacaaagagcgtaaacggctgccagaccgtaagcggctccccgcttactttaacgatcctgtcccccggttgtaaaccggctttttcagcaggccccccgggcgtcagtgcattaatctcattactgacctttgcggacaccggcatgatccccagagacaggacagcatcctgtttttccggatcaaatttccagcgggtgagatcgaggcgtttttccgccggggcagaccccggttccggaatcacattcagaacggtaaaatcatcaccgattttactgatcatcgccatgcgcacactattccagtcaggcgtttcgatgccgtcaacggcatttagttccatcccgggcaaaatatttgcctgttctgcgaccgaccccgcgcggatatccgccacaaccgggcgaaccgccggcacgccgatcataaacacaatccagtacgccacgatggctaacagaaagttagcaatcggcccggcactgaccaccgccgcccgctggccgacggttttgttattaaacgcctgatgacgacgctccggtgctaccggtgccacgcgctcatccagcattttgacatagccgccgagcgggatcattgcgatgacaaattctgtcccgtgtttgtctgtgcgccgccagagtgctttgccgaaaccgacggagaaccgttcgacaaaaataccgcagcgccgggccacccaaaagtgcccgaactcatgtacggtaaccaaaatccccagcgcgataacaaacgcggctgagttccagataaaagtcatcatgcgttttctgtctgctcccggtgtgcttaaaagccggagaatactaacaggatcagaccggcaaataccggtactgccgcggtcaggctgtcaatgcgatccatcacgccgccatgccccgggatcagctgactgctgtccttcacgccggactgacgtttaaacatactttcagtcagatcaccgaacacggaaatcagaaccacaatcactgacacgataatcaggttttccggcagtgtctgtaacggcgaatagtggctgaacagccaggacaccagaccggcggtaatcaggccaccggccagaccttccagggttttgcccggcgagacacgcggtgccattttgtgtttgcccagcagacggccgaaggcatacgccccggaatccgccgcccagaccagcagcatgacatacagcagccaccaggcaccctgatacacatcaccgcccgcatatccctggttgcgcagtaccatcatgccgctgtaaaacggaacaatggtcaccacaccgaagatcaggcggataatcacagaatctttccacagcgcggcggatttcgggaaactgatcaccagcagcaccgcgcagacccaccagaccagcgccgcccacaggctgacctgtacagcagcatccgccatcaggttattcatatccagtgtcagctgccacgcagccagaccggcggcaaacagcgcaccggtgacaatacgctgtccggcacctttcagaccggcaaactgcgcccattcccagccggccagaccacacacggcaatcaccacccagccgaaatgcgccggtgcgagcataaacatcgccagcagtaccagcggaattaaaataatggcagtaattagacggtacttaagcaacatttcctcccggagcctgctcagactgatcatcaggtgtggttccgccgaaacggcgctcacgctgtgtaaaagaagtcaccgcatcgctgaatgcgttttcatcaaagtcaggccacagcacttctgtaaaataaaattcggcgtacgcaacctgccagagcaggaagttactgatacgatgctcaccgccggtccggatcacgagatcaatcggcggctggtcatgaagcgaaatatgacggctgatatcctgttcgctgacatcctcagcggacaattccccgcgctgcacctgtgctatcacctgtttcacactgtgggtgatatcccagcgtccgccgtagttggcggcgatattcagctgtaaaccggtgttattggcggtcagcacctgaccgcggcggatacgctcctgcagacgcgggctgaaccggctgatatcaccgatgacggataatctgacattgtgtttgtgcagacttttgacttcgttgtccagcgcaaagacaaacaactccatcagtgagtggacttcctgttcaggacggttccagttttcactgctgaaggcataaagtgtcagggattttatctggtttttgatggcaaaactgaccgagctgcggaccgatttgatccctgcgcgatggccggaaacccgcaattttccgcgtttttttgcccagcggccgttgccgtccataataatggcgacatgctgaggtcccggcttttctgaggcattttcactggatactgtcacgcaagttaatcctttgaggtatcggttaatacatggcgtcagacacaaaaacaccgtgcaggttcacggtgttgtctctgtttgtcagtgataacgtcatggtgttattaaccggtcattaaaaatctgatttacagaaatcgcaacgctgaactatatcacttgcgctattcaccgacaaacgcaacccgttaatataaattaattacttcgcgatttttccgattgatttacgggtcagttcccgcgcctgtttatcaataataaggacatcatcaattgactgaggttccgtgaaccggtgattttccactaccatacggtttatttgcgcgatatctgtgaaacggattctgttttgtaaaaatgcctgcacggtttcttcattcgctgcattcattgccgtggttgccgcctgcccgtcatcacaggcttcgatcgccagtttcaggcacgggtaacggttataatccggctcagtgaatgtcaggccgcccatacgggtaaaatcaagacgctcagccccggcggtaatacggcccggataactcatggaatagctgatcggggtgcgcatatccggggtgcccagctgcgcgataatgctgccgtcagtatagcggaccatggagtggatcaccgactgcggatgcacaatcacttccatttgttttgctgatgcattaaagaaataacgtgcctcaatatattcaaggcccttattcatcatcgtggcggaatccacggaaattttacgtcccattgaccagttcggatgtgcacaagcctgatccggagtcatattggccagttcagataaggtggtttcgcggaacgggccgccggagccggtcaggataatggaatcaatacccgcggcagtcaggtcagcatgcccgagagataactgtacgccggtcggcagggactgaaaaattgcgttgtgttcgctgtcgataggaaacagttcagcgcggctggtgctcatggcagcaaaaaacaggcgtccgctggtaatcagtgcttctttgtttgccagcagaatgcgtttgtccgcacggatagccgcgagagtcggcagcagcccggccacaccggtaatagcggccattacctgatccacttcatcaagctgaaccacttcacagatagcggcgctgccgctgagtacctcggttgcactgccgtggagtttcagctgaatgcgcaattcaccggcagccacttcgtcggataacaccgcatagcggggtttaaattccagacactgttcaaacatcgtctgaacatttttcccggctgccagaaccaccgcacggaacagatccgggtgctgacgaataaccgagagtgtgtttttaccgatagatcctgtggatccgagaattgccaaacctttcatgataaatactcaatgttactttatcgttatttcgaatcgcaaaagtatagcactttggtcaacagagagtgagaagtcatttccgcaactgataagtaaaaaaatagtgccgtcaggcactatttttatatgttctgttcagcacagcatccggatcagaattccatcagctctttttcttttgctgccagtgcatcatcgatttttttgataaacaggtcagtcattttctgaacgtcgtcctgggaacggcggtcatcatcttcactgatttctttgtctttcagcagtgctttgactttatcgttcgcgtcacggcggacgttacgcacagcaatacgaccctgttcagcgtcaccgcggacgactttgatcaggtctttacggcgctcttcagtcagtgcaggaagcggaacacggataaccgtaccggcagatgacgggtttaaaccgaggtcagaggccataatcgctttttcgatagccggtgacattgaacggtcaaacacagtgatagccagggtgcgtgaatcttccgcaaccacgttagctaactgacgcagcggagtcggtgtaccgtaatattcaacaacgataccgtccagcaggctcggggaagcacggccggtgcgcactttactgatttgggatttcagcgactcgacgcatttttccatgcgttcctgcgcgtctttctggatttcattaatcacgttatgagtccttggaaacgggtaatttttcagaccgtgcctgtcgcgcggcccgcattataattttggcgaatcgatttataaatgataccgtcaaattccgccggtgtcccggcgtttagtcacgcgaaatcaaggtaccttcgttctcgcccatcacgacacggcgtaatgcaccgggtttgttcatgttgaaaacacggattggcaggttatggtcacgggccagggtaaaggccgccagatccatcactttcagttcgcgttccagcacatcctgatagttgagtttttcatacagcaccgcatccgggtctttggccggatcggctgagtaaacaccatccacttttgtggctttcagcaccacatccgcttcaatttcgatcccgcgcagacaggccgcagaatccgtggtaaagaatgggttgcctgttccggcagaaaaaataaccacacggccgtgacgtaaaagactgattgcctcagcccagctgtagttgtcacaaacgccgttgagcggaatcgcagacatcagccgcgcattcacataagcgcgatgaagtgcatcacgcattgccagaccgttcatcacggttgccagcatacccatatggtcaccgacaacgcggttcataccggcttcggccaggcctgcgccgcgaaacagattgcccccgccaataacgacaccgacctgaatctgcagttcaaccagttccttaatttcctgcgccatacggtcaagtacagtcgcatcaattccgaaaccttcattcccttgtaaagcctcgccactgagcttcagcagaatacgttgataaacaggttttgcattggtagccatggtgttctgtcctaaacagatgaatttattgccagagatacccggacggatgcccggatgataaacaggggtactgcagataaaacagaaccgccttccggcggctctgatatgcaatgattatttgctcattgccgcgacttctgcagcgaagtcagcttcagctttctcgataccttcacccacttcgaaacggatgaatgcagtcacgtctgctttgttttctttcagcaggtcgccgacagatttgcttggatccataacgaacggctgaccggtcagagagatttcgccggtgaatttgttcatacggccgataaccattttctctgcgatttcctgaggtttaccggactgcattgcgatatccagctggatttgtttctcgtgagcaacaacatcagcaggaacatcttcaggtttggtatattcaggtttgcttgccgcaacgtgcatagcaatgtgtttgatcagttcttcgttagcgccggttgcagcaaccagaacaccgatacgtgcaccgtgcatgtaagaaccgaccatgtcgccttctaagatagcagcgcgacggaagctgatgttttcaccgattttggcaaccagtgcaacacgctgttcttcgaatttcgcaacgatagcttctgcatcagcagttttctcagccataacgaaattcaggatgtcctgtgcgaatgccaggaaaccggtatcttttgcaacgaagtctgtttcacagttaacttcgatcagtgcgccgaatttagtatctgcgctgacagcagataagataacgccttcagcagcaacgcggcctgcttttttcgctgctttcgcctggccggatttacgcatgttatcgatagctaattcgatatcaccgtttgcttcaaccagtgcttttttacattccatcatacctgcgccagtacgttcacgcagttcttttaccaatgcagcggtaattccagacatgttatttcctcgatgagctcgcagaaactgtttctgcggggagttgttcgtatatcagatgcgtatagggagccatgacggctccctaaccatttgcagcaatacctggttaataagagcgctcagagagcggactcagattattcagcggctaattcttcagcctgaacagccagatcctgtgaacggccttcgcggacagaagtcgcgactgcgcccaggtacagcttgattgcacggattgcatcgtcgttaccagggatgatgaaatcaacaccgtccggatcagagttagtatcaacgatagcaaatacagggatacccaggttgtttgcttctttgattgcaatgtgttcgtgctcagcatcgataacaaacagagcgtcaggtaaaccgcccatgtctttgataccgcccaggctattttctaacttaccaagttcacgggtacgcatcagcgcttctttcttggtcagtttgtcaaaagtaccgtcctgagactgtgcttccaaatctttcaggcgtttgattgactgacggactgttttccagttagtcagcataccgcctaaccagcggtggttcacgaagaactggtcacagctgattgcagcttcctgtaccgcttcgcttgcagcacgcttggtacctacgaacaggattttacctttgcgtgaagcgattttgttcagttcagctaatgcgtcgttgaacatcggaacagttttttccaggttgatgatatgcactttgttacgggcaccaaagatgaatggtttcattttcgggttccagtaacgagtctggtgaccgaagtgaacgcccgcctggagcatatcgcgcatggaaacagtagccattttaaacctctgtaaataataagttggggttatgcctccacgaatcccatgcttccgactccctgtcagcgttaagcttcggagcaccccggcgcacgtgccgattcgtgtgtgttataacagttgagttaatttaagtttccggcaaccgggcaaaatacacggaatgccggcgcgctttataccataaaagccgcagcgataccacattttcttcagttttcatgccggcggttatccgttgtccgccgggtttccgcgcaatgattggcatccttttctccggctgataacataccgcgtttcagtaccagtattcctaagtaaagtcacggggcgttcccggttcggatatcaataattatggcaatcacaatcaaaacagaagacgacatcgcgaagatgcgtgtcgccggtcgtcttgcggccgaagtgctcgaaattatcgccccgcatgttgtgccgggtgtcagtaccggtgaactcgaccgcatctgccacgagcatattacggtaaaacagcaggctatttctgcctgtctcggctaccacggcttcccgaaatctgtctgtatctccgtcaatgatgtggtctgccacggcattccgagtgaagataaaatcttaaaaaacggcgatattgtgaatatcgatgtcactgttatcaaagacgggttccacggcgacacctccgctatgtttatcgccggaaaaccgacgattcagggcgagcgtctgtgccgcgtgacacaggaaagtctctatctggcactgcgtatggttaaaccgggcatccgcctgcggactatcggcgcggctatccagaaattcgcggaaggccatgattactctgtcgtacgtgactactgcggccacggtatcggcgaaggtttccacgaggaaccgcaggtgctgcattatgacggcgatgacggcggtgtggtgctgaaaaaaggcatggcatttaccatcgaaccgatgctcaataccggcgattaccgcatccgtaccatgaaagacggctggactgtcaaaaccaaagatcgcggtttatccgcacaatatgagcacacgctggttgtcaccgatgacggctgtgaaatcatgaccctgcgtaaagatgaggaaggtgcgctttcccgtattctcgttgcgcagtaaccgccctgtattcatgtccggcgcacatgccgggcatgatacctccccgccgtcaggacgctgaggaataaacggaatgacaacttccccccggaaatctgcctgtatcattattgctattgtcacactgatcctgcttgtcatgctggtgccgttttatttcctgaccaagtcgttcggctggtggcagaaagagtttgtcgcacgcgggtatgctgtcggtgtgcaaatccaccagaatgtttacgaactgaatctgtttgatctggcctttaccaaaccggtgtttgatcaccagtcagtgtatgtcccggcaagcagtctcggctcctatttcacgctggttgcgttgtcgcaacaatcgtttccgacgcggaaaaacatcctgctgccgacggaaaatccctatttcaacggccggatcagcatcactgccctgaatattgataccgccgcgctggcaagcgagagcagacagtacctgaatgccagggagagctaccgcatcacccgtctgaccgcttcaccggaccgctctctgttcagtttcagtaccgatgataatgccccggaaatactgcaatcctccccgtacctgaaggatatcgtcaatcagggtatgtgccgcacagacggacagagcaacggctgcgggatcgccgaagatacctatattaacctcagtgacgtcctgcataactacttccgcagctgcctgatttaccgggtggatgatgaaaacaaacgcattattctgcagtttatcccgatgcccggcccggtgctgatataaccccggcagaccggcaaaaaactggttatttccccgctgacgcagtaaccttgcagcagaacatctctgccacaaggatcccgcatggacaacgcccggagtaccgcatcagccctgaaacccgcctcgccgttatcctttactgatgatgatttgcagctgcctgtgctgcgggaacacctggagcattaccgccgctggcaggcagaggctttccgcgaaggccagccggttcataccctgctgctgacccgcagtgattatatcgatcagctgctgatccgcctgtggcagtttttcagttttgatgaggtgacggatttcgccctggtggcggtcggcggttacggtcgccgggagctgcacccgttgtcggatatcgatattctgctgctgagcagagccccgctgccggaagcactcacgccgaaaatcggtgagtttattgccgtgctgtgggatttgaaactgacggtcggccacagtgtccgtaccctggatgagtgtatccgcgaaggactcggcgacctgactgtcgccaccaacctgattgaatcgcgccttatctgcggcactctgccgctgttcctgcagttacagcggcagatatttaatgacagcttctggccgtcaccgcgcttttttgccgccaaactggcagagcagaaagagcgccacgcccgctatcacagcaccagttataacctggaaccggatatcaaaagcagtccgggcgggctgcgtgatatccataccctgctctgggtggcgcgccgccattttggtgcgacgtcactgtatgaaatggccggttccggattcctgaccgatgccgaacgggaagagctgaatgaatgtctggatatgctctggcgcatccgctttgccctgcatctgtccctgagccgctacgataaccgcctgctgtttgaccgccagctcagtgtggcggagcaactggggtatgacggcgagcacaaccagccggtcgagcggatgatgaaagcctattaccgcgtcacccgccgtgtgtccgaactcaatgagatgctgctgcaattgttcgacgaagccattctgcacgcagggcaccacgatacccccaaaccgcttgataaggattttcagctgtacggccatcgtatcgggcttatccgtgattcgctgttcagtgaggatcccgctgccattatgcggatgttttaccgcatggcctgcgatgacaccatcaccggcattcattccggtacgctgcgtcagctgcgccatgcccggcggcacctcagccgtccgctgatggagtatccggaggccagagagctgtttatcgcaatcctgcgccatccgcgcggtgtgagcgccgcgtttgttccgatgcaccgccacggcgtgctgggcgcctatatgccgctgtggggcaatattgtcgggcagatgcagttcgatctgttccatgcctataccgtggatgaacacacactgcgggtgctgggaaaaatcgatactttcaggctggaatccgagcgggtgaatcatccggtgtgtgtggatgtctggccgaaactgccgcagccggaactgctgcgcctggcagctctgttccacgatatcgccaagggcagacagggcgaccatgccgttcttggagcggcagatgcacgggaattctgtgaatatcacgacctgaatgaagccgacaccgatctggtcagctggctggtggaaaaacacctgctgatgtcagtgaccgcgcagcgccgggatattcaggatccggaagtgatccgcacctttgccggtgaggtacagagcacagagcggctccgttaccttatctgtctgactgttgctgatatatgggcgaccaatgcctcactctggaacggctggcggcgcagcctgctgcgcgagctgtttatcagcacagaaaaccagttattgcgcggggtgcacaacaaaccgaatctgcgccagcggatccgccaccaccgcgaccgtgcgctggccctgctgcgccaggacggtgccgatgagcagaaactgaaccggttctggtcgcgctgtcatgcggattattttctgcgccataccccggagcagcttgcctggcacgccggggcactgctgaaaaatgatatggcatcaccgctgatccttatcagtaaccagcgcagccacggcggcagtgaaatttttatctggtgcaacgaccgcccgtccctgtttgcctcggtggtcagcgagctggatcgccgcaatctcagtgtccagaacgcccagattttcaccaaccgcgacaatatggcaatggattcctttgtggtactggagccggacggcaagcctctcgccgccgatcgccatgacaccatccgcaaagcactggcctgcgcggtcaccacggattatgtgccgaaccaccgcacccggaccgcacccgccaaactgcgccattttgatgtgccgacgcgggtgaagtttattcacaataaacgcggcctgcgcagctacatggaattatatgcgctggataaacccggactgctggcgcaggttggtcagatttttgccggactcggccttcagctgcacggtgcgcgcatcaccacaaccggcgaaaaagtcgaggatatttttattctgacggataaggataataaagcgctggataaaaatattcaggaagaactgactgaacggttgacaaaagccctcaattcaaaggataaaacagagtaaattcatcaaagcaccagataaaaggaaacgaacaccgatgcagcaattacaggccattattgaatccgcctttgaagatcgcgccgctgtgacaccggcaactgccacccctgcactgcgtgacgcagttaatcaggtgattgagttactggacagcggaaaactgcgcgtcgctgaaaaaatcggcggcacctgggtgacacatcagtggctgaaaaaagcagtgctgctctctttccgtatcagtgacaatcaggtgatggacggggctgaatcccgttactttgataaagtcccgatgaaattcgcggattacgatcaggcgcgttttgagcgtgaagggttccgggtcgtaccacctgcggcagcccgccgcggagcgtttatcgcccgcaataccgtgctgatgccgtcttatgtcaatatcggtgcctatgtggatgaaggcacgatggtggatacctgggcgacggtcggctcctgtgcgcagatcggtaaaaacgtgcatctctccggcggtgtcggtatcggcggggtattagagccgttacaggccaatccgaccattatcgaggacaactgctttatcggcgcgcgttctgaagtggtggaaggggtgattgtggaaaccggctccgtgatttccatgggcgtgtatatcggccagagcaccaaaatttatgatcgcgaaaccggtgaaatccattatggccgtgtcccggcgggctctgtggttgtctccggcaatctgccgtcaaaggatggccattacagcctctattgtgcggtgattgtcaaaaaagtggatgaaaaaacgcgcggcaaggtcggaattaatgaattgttacgcaccatagactaatctcagaaatagcggataataactccgctatttttttatccgtgcatcttatcttccgccttttgcggcgggaacaggacagaataacaatcaataggtggcgcacatgtacgacaatttaaaaagtctgggaattacgcatcctgaagatattgatcgctatactcttcgtcaggaagcgaacaacgacattctgaaaatctatttccgcaaggataaaggcgagttttttgccaagagcgtgaagttcaagtacccgcgtcagcgcaagactatccaggatgcacagggtttcaaagaaattaatgagatcaacagcaacctgcgttatgtcatcgaagagctggataccatctgccagcagaccgaaagcgcaatgccggaaatcgatctgaaacgtaagatcctggacgatctccgccatctggagcatgtggtgtccaataagatcgccgaaattgaaagcgatctggaaaaactgacccgcaagtaaccggatgaaacagtgccgcagtgctgcaaagccgctgcggcgttgttttccgtgatcagctgaccagtgccgcccaggttttcagccacggctgtgcaaactcttccggtgcagcgacttccgcgccgtcaatcaccagcatctcgccgatgcgctgtgcatgctgctcctgcagtaattcattgaactgacggccgccaccggcaaaattatcataactgctgtcgcccagcgcgataataccgtagcgcagtgacggctgataaccgatgtcatcccgcagaccggcaaacagttcgcggatattatccggcagatcgccctgaccggtggtggaggtgatcaccagtgccacatccgtgaggtaatctttccactgtgacagttccggttcatcaaataacaccacttcatgaccggcctgctccagaatggtctgcgcctcttcacccacagccagcgagttgccgtaaactgtgccgataaaaataccgatacgtgccattatccgtcctttttcatcagtaaaatcaaattattaataaatcagggtaatgtccagccaagctgttccgccacccgctgccaggtttcatcgaaaccggcatgcagcaccagcggctctccgctgaccggatgtgtcagtgccagttcagatgcatgcagcatcagccggcggctgccgaaatgttctgtgaatccccggttctgacgcagatcgccgtgggcggtatcaccgataatcggatgccgcagatgctgcatatggcggcgcagctggtgtttacgtccggtttccggtttcagttccgtcagggtaaaacgggatgtcgggtaacgcccgatagccaccggacactccactttcgccagcgggcggtagtgtgtcaccgccggttgcgccggtttttccgccgcaaatttatcggcgattttatccagctcttccaccagcgggtaatccagcgtcgccgtttcttctatccagccgcgcaccaccgcatgataggttttctgcatttcatgccgctcaagctgttgtgacagcaaccgcgccacctctgatgacagccccatcagcagcacgccggaagtcggtctgtcgagacggtgaaccggaaaaacatgctgacctatctggtcgcgcagtgtctgcatcacaaacaccgtttcatgacggtcaagccagctgcggtgcaccagccctccggcgggtttattcaccgcgacgatatgttcatcctgataacagatttccagtaatggtttttccggtaatgttttttccggtactggtgtgtcctgcaatggttgtgtcacgcgaaaagcccgtccagtgcccgtaaatggtcaagcagcaccagatagcgtgcagcctgttcgtcccctctgtagtgctcttcaaaatacggggctatctgaaaggcggacggcagtgccgcaccctgttcaatcatggcatacagacgcgggataaggatccactgtaaccactcgtgggcattcatggtatccaccgcaaacggcagttcgctttcaaatgcttctgctgccggaggctgcccctgccacagatcgacggcgcgcatctcgttctcgatgtccgtcaggatcgcagtaatctgctgatgttttgtcataactgaaacctgtttacgctgtaaaattcattttccgcagccaatgccgctgatatctgtagcgtaacattgaggtcagataagtaaaaatcaattcctgtccggaagacataaaaaggcataacggggatttgcggggggattaaaaacgagggggaaaaatccccctcgtttctaataaaataacatcctgtctctgctgaaaatacatccgtgtatttccgtccacttccttatgggcacagacagcatgcctcagcacggcgtgacaggcaataataccggcaggaaatcacggtggcacggaaatattaatcccatgaatttactgattattttcagtaattcgtgatttaccggcagaccgtattacagccatcaccggtaaaatcccacaccgctgtcagtgatatttatgctgtgcataccgccgtcagctgtgacaggaatgatgccgtatccgctgccagcacccggcgctttgtggtgccgaacgtttcgaggatcacttcaccgttcagattacagacagaaatcatgtcgaattctgattccagtgtggcgataaactgtgtcggcggcagtttcaggcggcgctgcgtgaccagatggccaatcagattttcctgtaaacggataaaatcatcctcactccagacctgcaccagactgagctgaatgtcctcaaaaacagcctgcatatcccccgcaaactgctgcgtgtaaaattcactgatatccgggtgcagctgaatatccagcgctttttcaaccggctgcaaatgcttgtctgcggtaaattccgccggttcccagtacacacactcatcaccggtgcggataatacacggggaaggaataccataaagatcgtgactgatcggcggtaaacctgttttttcctgccataaaccgacataatgccgggtaaactgatgtaacgcctgagaaactgtgcgggtcatatcgcaaaacctgttaaacataaaagtatcatgccgctatagtaacgtatgacagactgtattggcgacaggcggtactatttttcacctgaggtaaaagggttatttatgtctctgtatgaaggaaaggcggaactggcgtcactgacgctcggtaaaaaaaccggttatgagcagcattacaatcccaccctgttgcagggtgtgccgcgcagcctcaaccgggatgccctgcatctgcatgcggataatctgccttttcgcggtgcggatctgtggacactctatgagctctcctggttacagccgaacggcgtgccctgcattgcgctcggctatgtttccctcgatgccgccgggctgaatctgattgaatccaagagcttcaagctctatctcaacagctttaaccagacggtatttgcctctgcggatgatgtccgccgcacactggagcaggatttaagcgcctgtgcacagggaaaggtgacagtggagttgctgcgcccggagcagttcacggaacaaaaaatcattgattttaccggcgagtgtatcgattatcaggatattacaattactgattatcagttcagcagtgattatcttattgatgccgtcaatgaaaatgacgatgtcgttgaagaaacgttagtcagccacctgctaaaatcaaactgcctgattacacagcagcctgactggggctccgtcgccatacagtatcgcggccctaaaattgatcgtgagaaactgctgcggtatctggtgtcattccgcaaccataacgagtttcatgagcagtgcgttgagcggatttttaccgatctgaatacacactgccgcccggttgccctgactgtctatgcccgttatacacggcgcggcgggctggatatcaatccgtggcgcaccaatacggactttacaccgtctgcggaccgtctcgcccgtcagtaaggcagacagcgcgcaacctgtacgactacaatttatccacgggataacaaggagttttacttgatcacacatatcagcccgttaggctctatggatctgctttcccagcttgaagttgatgttctgaaacggacagcaagcagtcacctgtaccgtctgtaccgcaactgttcgctggcggtactgaattccggcagccagatggataacagtcatgaattactgtcccgtttcccggattttgatattaacgtgctgcgccgtgagcgcggggtaaaactcgaactggtgaacccgccgcagaatgcgtttgttgacggcaaaattatccgttcactccaggctaacctgtttgccgtgctgcgcgatattctgttcgtccagacccagatcaccgatgctgagcgctgccgcggtctgaatctggataacagcgcgcatatcaccaacctgattttctttattctgcgtaacgcccgcgccctgcatattgatgaagacccgaatatgatcgtctgctggggcggtcactccatcaatgaaaccgaatacctgtacgggcgtaaagtcggtaacgagctcgggctgcgcgagctgaatatctgtaccggctgcggaccgggcgccatggaagcgccgatgaaaggcgcggctgtcggccatgcccagcagggttacaaaaacagccgttttatcggtctgaccgagccgtccattattgctgccgagccgcctaacccgctggtgaacgaacttatcatcatgccggatatcgaaaaacggctggagagctttgtccgtctggcacacgggatcatcatcttcccgggcggggtcggtacggctgaagagctgctctacctgctggggatcctgatgcatccggaaaacaaagatcaggtactgccgctggtactgaccggaccaaaagagagcgccgactatttccgtgtgctcaatgatttcgtgatcaacactctgggcgaagaagctacccgccattatcagatcattattgatgatccggtggaagttgcccgcgtaatgaaacgcgccatgccggaagtgaaagataaccgccgcagcaccggggacgcttacagcttcaactggtcgattaaaattgccggtgacttgcagcatccgtttgagccgacacatgaaaatatggccgcgctgaacctgtaccgcaatcaggagccggaaaaactggcggcagatctgcgccgtgcgttctccggtattgtcgccggtaacgtgaaagaaaacggtatgcaggccatcgcacagcacgggccgttcaaaatccacggcgaggaagccattatgcagcggatggatgtcatgctgcgcggatttgttgaacagcaccggatgaaattaccgggcggcacggcttacgagccatgctacgaaatcatccgctgatactttttatctgaactgtttccccgccgccggcggggaaattatatatagcgactatgatccatttactgattatcgatgcaatgaatctgatccgccggatctacgccgtgcagagccagtccggcctgctggtctgtgagcaggcgctgatgcagatcctgaatcatgcacaaccgacacacgcggtcactgtctttgatgaggacgaccgcagtcacagctggcgtcatcagctgttgccgggttacaaagcgggacgcagcgaaatgccggaggttgtccggcaggaactgccgctgctgcgggagatgtttgcccgtcacggcatccgggcatggcattccgaaggggatgaggcggatgatctcgctgccacactggcgcacaaagtcggtcaggcgggacacagggtgacgattgtctccaccgacaaaggctactgccagctgctctccccgcagattcagatccgcgactattttcagaaacgctggctcgatatgccgtttattgccgccgaatttggcgttaccgcgcagcaattaccggacttctggggcttaagcggcatcagcagcagtaaaattcccggcatcaccggtatcggcccgaaaacagcggccacactgctcagcacctttgctgacctggactcactttacagccacattgatcaggtaccggagaaatggcgtcagaaactgatcgacggaaaaaccatggcttacagctgccgtgacgtcgccaccctgaagcgggatctgcatttacagggaaatctcagccagctgcgcttaccggcggggaacagcaacccttaaaccagacaaacggagtgcctgtgtttactcagcttcgctatattgccggtactttcgtggtgctcggcctggtcatgctgctggctgcggcctgtcttgcataccagacttatcaggaagagcagacccgtatcatcaccaccgggctgattacggatatcacccgttcgcgctcctatgaaaataaaccggttttctgtccggtgatccgccataccgccggcggggaaagctatacattcacctcttcgcactgtttcagcagccgcaactactatgccgctggtgactttactgacattgcttatgccccgggagagccgcagaatgcggaaatacactcgttacccgcgctctacgcctggccaatcttttttatctttatgggcggcccttttgcactgattggctcactgccttttatcattatggcggtacggaaaaaatcaggaaaacacctgctgcaggcaggaacacctgtcagagtaaaaatgacgggggtgatttccaatacaacaatcagtatcaacggccgcaatccgtaccaaatcgaagcacaattacataaccccgccgacaacaccctgaccttttattacagcaccaatctcggctttgatccgacaccttatattcatcaggaatatgcaacggtatatctggacaaacggaatccccgtaaatattacatggatatttcgtttctgccgcgttcggaataatcccggtcaaatttaacttaagttgaaatcgttaggtaaaccggcggccatcctctacactcggttttattaatatattaaccagctagcggatggcctatgtttacgaaagcacgcattattttaggaatttttgcagttattggtttgctgatgctgatgggcggcagttacttttacctttccggttattcacaggaaaaaagcgggatagtggtcaccggacaaattatcgatctgtctgttcaccgctcggatgacggtgcttcttattgccctgtggtgaaatacactgacgggcaggaagagtatgtcatggagtcctcttattgcagcagcggttaccgcaatgcactgggtgacgatattgatgttatttaccagccgggcaacccggataacgcggttatccactctttcggcggactgtacggcggagccgtgattcttctcgggatgggtgcggtatttgcactggccggtacgctgccgctgattatcatgtatctgcggagtaaatccggtcagcgcctgctgcgggaaggaatgccggtcaaagcccggttcagtgaagtgatcctcaataccacgatcaatatcaacggccgcagcccgtttcagattgtggcacaaatgcatgacaccgcggcaaacacggtgaaactgtattacagccacaatattgcgtttgacccctcaccgtttattaatcaggagtttgtcaccgtttatgtggacaagaaaaatcctgataaatactacatggatatctctttcctgccgaaggtgaagtgatacctaaaaaaaatcccggcaacaattgccgggatttttcatcagaatacccgatccgggttatatgcaccccacacccgctggacatgcacagtaatttcctcacggtcatggtacagatgtttcgcgtggatcagcgcattcacgccctgctctttcatttcagcagccattttttcgaggatatgagatacctcttcatagcgctttttcatcggcagtttgaggttaaaaatcgtcccgcggccccagccgttaaccatccaggtggtcatcagtgcggccactttcgccggtttttccaccatatcgcagaccagccaggtaatatttttggatgtcggcacgaacttaaagccgtcctcacggagatggcgaacctgaccggtttccatcagactttcggccatcgggccgttatccacggcctgaacacgcatactgtgtttcaccagctgatacgtccagccgcccgggcatgcccccaggtccaccgcctgtaatccgccttccagacgctcttcccactcgtcatacggaataaacatatggaatgcttcttccagcttgagggtggagcggctcggtgcatctgacgggaacttcagacgcgggatccccatgtagaacgcggagttattattcgagtaagaataaccgacatagcaacagcccggcgcgataaagaaaacgtgaatgaccggacggccccggttctcttttgccagcagcagtttttcctgacgcagtgccgaacgcagcggtaccgtgaatttacggcagaacttcatcagctctttggcttcgttggtgtcaggcacttcgacgcgcagatcacccgcacgctcaaccacgccggtcagcatccccatgatcggcgaaatccggtcattttcgggtaagtttttcagcagttcgccgacaactatcatctgacgggcaaaaatcagttctttaaacgggatctcttttgcaatgcgatcggcatcatccggctgatagcattcaaaaatgacataaccgctgttctcttttacccgcgggaaaccaaaaatctcaagacgcccggctttatccgtgatctcagctgcacactctttttcaaaacccggacggcaatataatgctattttattcatggccggaagccactttccttagacgcagcgcgccaatcaatacacaaaaccagcctaacaggaaacttaccccgccaaccggcgtaaaataggcaaaatatttcatctgtaacagcgccatacaatacaggctgccggaaaacagcagaatgccgatcccgaaaaacagtccgctccagtaaaaccacaataccactttgcgcatcagcacagcggccagccccatcagggcgagtgtatgtgagatctggtactggagacccagattaatccagtccatctggtgctttgccagaaccggtgttaaaaggtgcgatccgattgcgccgaatgcaacataaaaaaagccgctgaaaccggcaaaaattaacatcaaccgactattcatttgccataccttatgtgatgttcaggttaatcctgctcacttgtcatccaacctagtttttcctgttcactcgccgcctgcgccataatccactgacggaatgctgcgattttaccggaatcagcctgactgtcctgacacaccagataaaacgcatttttactgaccagaatatctttaaacgggcacaccaggcgaccggcatccagttcattttttgccataacattattgaccaatgccacgccctgcccgtgcactgcggcctgaatcaccatcgcactgtggctgaaaatcggcccgtgctgcacattaacctgctgctgcaaatccgcctgacggatatacgcctgccagtcacggcgggatgaatcatgcagaagtgtatgatacgacaaatcggtcagcgttttgagcggccgttcaccggtcatcagtgacggcgcgcacaccgggatcagatattccgcatacagccggtctgtacgcagacccggccagttacccctgccgtaaaaaattgccacatccacatcatcggccagtttatcttcttcgcggtcaaccgcctggatccgcacatcaatgcccggataggcctgatgaaagccggacagacgcggcaccagccactggatcgcgaaactcggtgacagactgactgtcagcgcccctttggcactgcgtgcctggagtttgcgtgtggcgtcgtttatcgctgagaagatttccttaatatcgagataataactctgcccctcttccgtcagcaacaacgaacggttccggcggcggaataatttcagcccgaggaaatcttccaggcttttcatctgatggctcactgcggcctgagtcacaaaaagctcttccgccgccttagtaaaacttaaatggcgggcggcagcatcgaagacacgcaaagcattgagcggaggcaatcgtttggacattttctggtttttctgtcagatccggataccggtaacgtaagtttagtcgggattagtttttgtaatccgaagcattataaattgtcccttgatgatacaccagcaaatacctatagtatgcccacttcctaagccggaacgaaaagttgaacggtagcgatactgcaaaacttttggctatgtggttgtgatgttgtgtttgcaagttgtccgggagttccggacatagtagcttaagctactgtttttttcacttcctgtacatttaccctgtctgtccatagtgattttttgaatgcaccgccgattgcggtgcttttttttgccttccgtccgcagatacgtttcccccgtctggaaagccgccacgatgttgattatagtaaaccgtcgctgacggtgctaccgccgcgatccggccggtcaccaccgggctcccgcctctgatgtaccggataccgcactttttgcataagctctgtttatctcagactgccgttgataacactgatgaaaaccttttctcccgatacattccgccgcgcctttcccgggactgccggtgacactgtttttctcgacagcgccgccaccgcccttaaaccggaggtgatgacacaggccaccgcccgctattatcagcatgacagcggcgcgaccgttcaccgcagccatcaccggcaggccagagccgtcactgaacaatttgagcaggcgcgtgacgctgtgcggcagctgattcaggctgaagatgcccgcagctgtatctggacaaaaggcaccaccgaatccctgaacctggtcgctcagggctttttccgcccgcgtctgcagccgggggatgaaatcattgtcagtgagctggaacaccattccaacctgatcccgtggatcatgctggcacagcagaccggagcaaccctggtgaaatggccgctgacagcggacaaaacactgtgctgtgatcagctggaacacctgctgtcaccacgcacccggctggtggcggtcacacagatgtccaatgtcaccggctgccagccggatattgcccgcgcggcacagctggcacatcagcacggcgcactgattgtcgctgacggtgctcagggtgtggttcaccgtccgctgaatgttactctcagtgatgttgatttctatgcgttttccgcccacaaactgtatggtcctaacgggctgggtgtgctgtacggccgtccggagctgctcagtgatatgcagccgtggcagggcggcggcaaaatgctgacggataccgactttttcagcttcaccccggctccggttcccgcccgttttgaagcaggaacaccgaatgtcgccggtgttaccgcgttcggggaaaccctgcgctggctggatacaatcgatctcaccgccgcccatgattacaccattgtgctgtgtgacagtgcggagcagcagctcgctgaactgcccggtttccgcagttaccgcagcccgggcagcccgctgctggcctttaatatcgatagtattcatcacagtgatatcgccacgctgctggcggaaaaaaatatcgccctgcgccacgggcagcactgtgcgcagccgctgtgtcaggctctgggcacggaaggctgtctgcgggtctcctttatgccgtataatcagccggatgatgtccgtcagctggtgcaggcggtacagtttgctcttgaaatcctggctgacgactgagagaaaaaaatgacacacacattcccggcacaccctttcggccactctatccgccgtgagcagctcacggaaaccttttccgcctgccgttcatgggaggaaaaataccgtcagttggtgatgctggcgcgtcagttaccggcactgccgccggaaagcaaaggtgaagagacagaaattaaaggctgtgaaaaccgcgtctggctggatggcacactcagcagtgacggtacgctgcatttttggggggacagtgacgggcggattgttaaaggccttctggcagtactgctgaccgaagcggaaggtctgacaccggctgctctgttatccgcggatttatccgcagcgtatgaacaatacgggctgagtgcgcagctcagccagtccagacaaaacgggattcaggctctgattgatgccgcccgcgccattgcacagcggttcagcgcctgaaaggcttattccgccgctgcaatacgctctgctttcgccatcagctttttcagtgcatgagagaccgccacaaacccgaaggatgccgtaaccacagtggcggcaccaaacccggcggcacagtccatccgcatactcccttccgcactgtttttcataccgcaggccgcgctgccgtccgcctgcgggtagcgcagcggctctgtcgagaacacacaatcaatcccgagccgccctttgccgtttttgcgcacaccataatctgatttcaggcgttcacgcagtttcgctgccagcggatcctgtaaggtttttgccagatccgcgacctgaatctgtgtcgggtcgatctgcccgcccgcgccgccggtggtgaccagaggaattttattgcggcggcagtaagccagcagcgccgctttcgggcggacgctgtcgatagcatcaatcacataatcaaaccccggactcatcatgtcggcgacattatccggcgtgacaaaatcatccgtacaatgcacctcacattccgggttgatagccaggatccgttcccgcatcacctcaattttcggctgcccgaccgtgccctgcatggcgtggatctgccggttggtattggtcacgcacacatcatccatatcaatcagtgtaatggcaccgattccggtacgtgccagtgcttctgcagcccacgagccgacaccaccgatgccgacaacacaaaaatgggaccgggcaaataaacggagtgcctgctgaccataaagacggccaataccggcgaagcgctgtaaatacgcatcagataaagaagtttgtgtcatcggaaacctgcggtgtcagtcacggaaaaagaaggaattgatgccggtgcatacatcagagtgaagtatacaccggacaaaaggaagactacagcgccggattcaggatcggcgggatcccttttttcagtacccagacacggccgtagtgattgtaaaatccggccatcagcccggcatcgtggccgataccgtggtaaatatcgaagtgatgccccttgatagccccgccgacatccagcgcgatcatcaggcgcatatcataacggccggtaaaattgccctgattatccagcaccgggacttccgcgagcagcgtggtacccggcgggatcagggttttatccgaagccacagaggctttggcaatcagcggtaccgcgctcgcccctttcaccggtgcaaactgcttcggtgtgaagaagacaaaagaggcgttttgctccagtaattcctgcacttcctgcggagagtgattatcggcccactggcggatcgccagcatcgacatatctttcttctccacctcaccgcgatcgatcagaacacgcccgatactggtataaccgtgcccgttcttcccggcatacgcgaaaaagttcagctcagaaccatcaccgaaatcaatataagcactgccctgaacatccatcaggaagttatccatcagtgaattgctgtaggcgagaacgtagttatcactcagcgcgccgttataaatctgggcccggctcggcagacgactgccttttttcggcggcatgcggtagataggatactgaaactccccctgacgggtatgacgggcctgaacaaccggggtgtaatagccggtgaactgcacgtttccgtagttatctttaccttccatctgatagctgtgcaggttgaactgccgcagctgcgcggtatccgcaccggagcgcagccagttttcaaccgcgcggaagttctcgctgtactgattgtacagacgcggtgaggttgtccggatggcttccacctgtttcagaaagtccgggccgttgaccggtacgccgggactgttgacgttcgccacttcctgtaaattctgtgtcagatgcccgtctttatactgctgacctttatctgtcgggcgcgattcacaaccaaccaataaagaaaataatacgccgcacaacaaatacctgccggttttgctcatacccatccgccaaccaataatttgaattaatgcaatatgtatgcgaacgatatcaaatcgcttttattatgcaaccgctttaatttttgctgctgaacaatcatccggccaaatgaataaaaaacacgcaatcagccggataattaaccaaatcagggggtggtatagctttttatcaagaaaaaacttgcatcagctctcatcctgagtatagtgggcgcctcacagacgcgggatggagcagcctggt

SEQ ID NO: 106 - DNA, 12151 bp, unknown
  Altogen 322075 strain
ttttcatttcatcaagtttacgggaaaaaagatgttctctgtttgtttctgtattctcgatattactcatatccgttttctgataaccaatgcaaggatagatagcataccaattgtccttttccatcaacctgttccagtaatagtccagacaacaatattttcttctgactccattcattaacgactcttttgaagaagaaaaaacatccatcagtactttaaaataatgttgattaacaatatagctattcgctaaaaatgaaaaatataactgataaaaacaaccatgaacctgattgagggaaaaataacttcctgacaataagccggcatcccattctgcagacataaggctgctgaaaaaataattaattctgtctgatgattcatcatcatcattgaaaatcatatcatcttccagcacaagaacattattccaattattttcccctgccatcttcaatacattaatatgggagagaacacaccctaatgcgccattctcattttcaatagcttcgaaccgaataattttacccggaggaataccaatttttttcatctgaaattcaatactttcccggcgatcaaatctttttgccaggttaatataaacaaccttatcaacaaaatcccaattaaccttcaccatgctattgtcctgatattattctgaaaccactattatagttcccatgcttctgcttatgtaatccgctccggataacctttttttaattatccgattatctaacataccctttcagaggataaatcagccatttcaggtataaaaaaatcccccggcaacgggtagctgattattttgcagaaaacagaacgtttcgtagtacactccgcaacacagacacctgcagtcacagagttaaatgtgggcatgactgccgacatccacgatataaccggaattttgacttagtagcagatagccacaatctacacattgctccaattgccattatcagcatccccgtctgtgcggttgataaaccattgtctgttaattttaatattgtgaataccacaactgtccggagctgagtggaacagctatttggatttggtatactttgtaatgtcgattacggtgattatgattttattaaaaacaataaaactaaataatatagttcatagaagttttaaaaaaaccagaaaaagggcggatttaaataagaattgactaaataaaataggaaatctcatccggacaataactaatcccggcatccgccattattattttaaacctgagataatacagaacatcatgaataataaaatttttgtcagcatagccagttaccgggatccggaactgataccgacgatcaaaaacatgatagcccatgccactaaccctgagaatattattatttcagtgtgctggcaggcggaagaacgggatatcgctgtttttaccgatatcggcgctgcggaaattgattccggatcagataatccggatattttccgctttgattatcagggggcattactgcatgttcactacgtacatatttataatgccagaggcgcctgctgggctcgttactgtgctgagcaggtatttaatcatgaagattattttcttcagatagactcacattgccggtttattgaaaactgggacaaagaaattattgattattatcttgaattaagtaaaacgattgaaaaactggttgtcaccggatatccgccctcatataccccggcaaccgaagataaagaagaggtactcggcaccggcactgccagaatggtattgaacggatttcatgacagtgatatcccgtcatttaagcccgtcgcactcactgaccagagcagttatgtaaaaggatgttttgttgccggcggttttacattttcagtcggagattttcctgttgatgttcccaatgatcccaatctgttttttatgggagaggaaatatcgatgtctgccagagcatttacccgtggttacaatattgtttatccggagaaaatatttgtctggcattactatacccgggaagagtgcaataaaatatggggtgaccttaaccagaatttggttgataaaaaagtgataaagaaagggtggtgggaatgggactctctgtcaaaacaacgtgtccgcagcctgttaggtattggaattgatgaaaaacctgatcttggtaaatattgtctgggagatgtccgcaccctggaacaatatgaatacctgaccgggatttattttcgtgaacagttagttctccctgatttgattctggatcctaaaccttgtgctttcagcgaaattccaaaatccagggatgcctggctggcactgctttattctccgttttaccgggctgtcactattgataaatcagagcttgctgccaatgatgataatgttgattactggtcattaggtatatttaccgaagacaatcaactgattgccatgcagcgcctgactattgatgaaatggctgagcaggaatccggtgataataaagaaagttataaactggaaattaaactgaaagagaaaacacatcttatccctaaaaaactcaggctggctcccttcttcaccgactgcggctggggagaaacagtggaaaaaatatggtaaacggttttgtaccaaactcagcctttggattatcaactggttattctcccctgttccggaacaggggaaaattttactctttacgtgtcggccatatatcttctaatggccttttaaaatggtattctctgtccattatttcactctcaatatcactgaccccggtcatttgataaccaacgctcggataaatagcataccagcgatcttttttcattagtgtattccagctgatatccaggccacaatcatttctgtctttttcccggataagattatcagctgataataaaaaaacatcgattaatttatcataataatgcatattgactatatagctgttagataagtatgaataccggacatgataaaaacagccatgtatttttttaagccaaaaatagcttccggataacaatccggcatcccacgataccgatttaagactatcaaagtaatagtttattctctccgatgattcatcatcatcattgaaaatcatatcatcctccaaaataagaatattattccagttgttttttttcgccatcttcagtacatcaatatgagaaagaacacatcctaatgctccattctcattctcaatggcttcaaaccggataattttatccggaggaatgcccattttgttcatctggaattcaatgctttcccgtcgatcggttcttttttccaggttaatataaacaaccttttcaacaaaaccccagttaatctcaatcatattgatcatcctgatattattcctgaaaataattataacgtttgtacttctgcttatataatcagctccggataataatgcagggagtatgtcataacgtaactcgcgttttaaggagatagaccggctattacaggtataaaaaaaccgccctgaaacgggcggttgaagggtattgcagcaaataaccggaccgattattttttgtttttaaagtcaatgaccatacggccggtaaatttgccctgctccatctcttcaaagatggtattaatgtcttcaagcggccgcattgccactttcggtaccactttgccttcggcgccaaagcggaatgcttctttcagatcttcgcgggttcccaccagcgatcccacaacctcgataccgtccagtaccagacgcggaatactgagatccatggtttcaaccggcagaccgaccgccacaacacgccctgcagcacggacactggcgaccgcagagttaaatgcggatttggctactgcggtaactaccgctgcatgcgcgccaccgaggtctttctgaatgatttcatcgacattatcggttttcggattcagggtcagatcggcgcccatctcttttgccagtgccagttgtttatcattaacatcaatagcgatcactttggcattaaagacgtttttggcatattgcagcgccaggttacctaatccgccgagaccgtaaattgccagccactggcccggtttgatgccggaaactttgatcgccttataagtggtgacgccggcgcaggtaatactgctcgccgcggctgaatccaggccatccggcacttttaccgcataatccgcagtcacaatgcactcttccgccataccgccgtccacggtataaccggcatttttaacttcacggcagaaagtttctttaccgctgttacagtattcacaatggccgcagccacggaaaaaccatgcaacactggcacgatcgccgactttcagtgaggtgacgccttccgcgatttccgtcaccacaccaataccttcatgcccgaggatcacaccggagacatcaccaaaatcagcattttttacatgcaggtcagtgtgacacacgccgcagcattccattttcagcagggcttctccatatttcagagggcgtaatgttttctctttgatttctacggtcttattttttgcgacaacagctgctttcatagttcacctcagttatggaacaacagaaaagttatgttcagttcagcaacataacgaccattaactggtttattctagcgtgaaatacgtgataatactgcactctgaatgccaatgatttcaactatcattaataagaattattgcattcagagtgtatcagccattgccggttacaggcgggatgcgggatacagtggtgcgggcagcggctcccggggggcattttcaacagtaccgaaccggatatcgccattattccagtcactgacagcctgctgcagtgtctgtacatcgtagccgacaaaattccaccacatcattatccgttcctgcaccggtgtgccacccaggagcagcaaccgcgagcctttcatcagtgtgagtgtgacagaagacaacccttcaccgacatacaccagctcattggcggtataaacttcaccgcggtatgtcagttgcccctccagcacaaagaagccgtattcaaagtccggccgggtatcgagtgtggtttgtgttgcctgctgtgccagcaaatccatgccgatcagcggggaaaaatgcagaaccggcgaacagtgatcaccatattcgccggtcagtaatgtgaaactcacctggtcatgatgccagacaggtaaatccggatagtggtcaaagcgcggcgagatagtgctgtccaccggaggtaaggcaatccagagctgggctgcatgcagacgggcatttctgccggcggaatcttcggtatgtgtgataccgcgtcctgccgtcatcagattcacctgtcccgggcagataatctgctctgacccgaggctgtcccggtgcagcacctcaccttccagcatccaggtgaacgtctgtaagccgatatgcggatgcggcccgactttcatgccgtcatcccctttgaaaaccgccggaccggcatgatccagaaaacaccaggcacctatctgacggcgctcttttaccggtaatgcacgggataccggcacgccgccgacatctttaatccgcgcgctgatacgctggggtaagacctcttgtctgtctgtcatggtgtcacctgccttgtcagtgagagagtaccgtcagcaagcggacggctgccttagggtatcagtatactgttaagcattcacatgacaaataaagagaaagccccgcatatcacactatgatatgcggggctgactgacaggatcagcgctcacgcagggcttcgttggcccggttcagcggtttgaccagataacggagaatcgatttgctgccggttttaatatccacttccgcaaccatccccgggaaaatctgaaactctttgccggctttattaatcagcacatcacggctggtgcggatcagcacgcggtaatagacatggtcacgctgaatttcatctttcagcgtatccggggaaatcaggatcccccccccgtccagcccgccgtaaatcgcatagtcataggcggtgattttaaccagtgccgggtcattcagacggatatgcgcgatgtcctgcggggatatttttgcctcaacaatcagttgatcatccagcggaataatatccatgattttcccgcccggcgcgataaccccgccgatggtattcacttcgatatttttcacaatcccgcgtaccggtgagacgactttggcgcgctgtaaagcatcatcccgcgcccgcataacggactccagctcttccagctctttattgacttccgccagttgttcccgtgcattcaccacatattcgttacgcagctcctgctttttactttccagctcggaaatggtccgcttcaggcggattaattccacctcacttgatgcgccggattttacaaggcgctgcaatatcatctcttcacggcggtaaagcgcgagggaatcagaaactcctttaacagactgctccaggcgatctttgcgggatttgtacagacgttgttcggcattcaccagttcggtatcctgcttcacatcatccggaatgacaaacgccccggaagagacttccgccgtcagacgcgctgctttgatacggtttgccttatagcggctgcggctttcatccagtgaggattcaaaccgggtttcatccagataggctatcacctggcctttctcaacaatcgccccctcacgcacttccagtgaggcgaggatcccgccctcaagtgactgaatcacctgttcacgggatgacggaataattttgccctgccctttggtgatttcatcgacatcagacaacgccgcccagataagcagaatgataaagaaaccgaggatcaccgcaatcagccgtgccagacgcggcaggctcggttcgtgctggccgccgtagaaaaacggcacgccccgcaggttggtttccggctcctgcttcatggcctgaggatttaattttttcatctcagttctccgcctttgccggtgcatctgagccggacatcagatttttaaggacctcatcacgggcaccgtccagcgcaatccgtccgttgttcatcacaataatccggtcagccagctgcagaacactggtgcggtgcgtggtgacaatcagggttttatcctgagaccaggttttcagcccggcgatcagcttctgctctgcgatttcgtccagtgcggatgtcggttcatccagcagcacgatattcggattggtcaggatagtacgggccagcaataccgcctggcgctgaccgccggataatccgatcccgccttcccacagcacacggctcagcccctgcgggctgctgctgaccagatctgccaccccggcaatctgcaatgcccggataatctgcgcgtcatccgctttcggtgcccccagcgtcatgttatcgcgcagtgtaccgtgcagcagacgggagttagccccgagatagccgatatcacggcggacatcatagggatctatcgccgccagattgataccatccagccgtacctgtccggccaccggatccagtaagccgctcagcgcataaagcagagtggatttcccggagccgttacggccgagaatcgcgattttttcgccgggacggatagtcagcgagccgatagtcagtaccggactggcctgcaaatcataggtgatcgccacgttttcaaattcgtaatggccggtcagtgacggcttatggacgagccgggtgccgtactgagcatccaccggcttttccatcagttcattaaggcttttcagcgagactttggtggactgccagcgtgccagaagaccggaaatctgcgccatcggcgccatcatccgcgaactcagtatcgatgcccccagcagcgcaccggtggtaatcgccccgtccatcaccaggaatgccccgcacagtaccgtgaccgcaaacaccagtgtctggatagtctggctccaggtcatcagcccctgagtgataaatttcactttcaggttggtatcacccactttctcgttcagatagttccattcctgctggaaacgcggctctgcgcgatggaatttgatatcttccgcacactgaaccgcctcaattaatgacgcattacgcagcgtgctctcacgcattgcttcgttggcaagaacttccagtttcggctgtaacagcaggcccggcaggatcatgacaaacagtgccaccagcggtaccagtgccagcggcccggcgatcagccataaaatcacgaggaacagaaagaagaacggcagatcagatgcggcagtgaccgtggttgatgtgatggtttcccggacgttttccagctcgcgcaactgagacacaaaagtaccggttgagcgcatccgctctttcatccggatacgcagcgcgtgaccgaaaacggtatcggtgattttcagatccgcccgcttaccgataaggtcaatcagccgtacccgcataatccgcatggtgaactcaaatcccatcgcgatcagcacaccaataaacagtaccagcagggtcggaatggattttcccggaatgacgcggtcatacacctgcattgaaaacagaatcgaactcagcgccagcacgtttgccagcagtgccgcgatcagcaccgaggtaaaatatttgcggtcgcgcagaacaacgtcccagaaccagctctttttaaacggtttgatgtaatcatccacccgcgcatccggtacgttacgctccggccgggtcagaatcacctcaccgccctgtgtcagtttcagcaggtcatccatcgtaacgtggtttttgtgctgtccgcccccctgcaggatcacctgcacgcggccgtctgcggagatgctttccgcatacatcgcccgtccgtccggcagcgccacaataaacggcagataccagggattcagcatctcgcgggtcagcggcacccattccagtgtcagcccggtattgcgggccagacgctgaagttccgtccggtgttcagttccgctgctgtaggtaaaattgactctgacattctcttccgagaccggcagacgataatggcgtgcggcaaggagtaatgcctgcagccagctttcactgtgttcgttattttgttctgagatcaccggagactccgaagagattcattggataattgtaaactttcacggaaccgtcctaactgagaggagcaactaatgctggtcgccagatagtcatattttgccgccgcataatcgcgccgcgactgatgccattcctgatccgcattcagcaggtcaataatgctgcgctggccgagtgccacatactgttcctgataaaggcgggttacgtctttcagggagaggttacgggaatcgagcagtttcatgcgctgttccagttcattcaggcggacttgctgattgcgccagttattttcaaccacgttttgcgtatgctgaatttccgcattggccgcattttcctgatagccggccatgcgctgtttggatccgctggtgtaaaaattcgacagcggtacattcaccgtcagttcaacgctgtgatcttcccggccgtaacggtcggtatcttttgcatcaaaccgctgctgatatgacccctgtaatgcaatgctcggcatcgactcacgtttggctgcctcacggtcactctgcgctattgttaaaccggcccttgccaccagcacaaccggaacagtattaaaatcaatattctgcgaatagcactgctggctgtacattgtggcatctatcggttgtgaggagagctggctgacagagatcccggtcatccggttcagactcaggatctggttttcatgctcgagcttcagggtattgagctgcagctgcgcggtatcaaggcgggcttccgcctgtaccagatcggcacgggaagccgcaccggcggcagtccgctcacgggccaggtcggtaatatgctgtaccgacaccagctgctcttccgccagtacgatgaattcctgataacgtttgatatcgagatacagcatcgcggttttttcggccacttcatcagcattgacaaaaacacgcagcagcgactgatcactgcgggccgtaagggaatctatctgtgatgacacccggccgaatgaatagagcaactgactgacactggcggtggtgacataacctttatcactgttattcaggctgcgggaaacaccgagtcccggctgcgggtaatactcggtttctttctgatacaccgcttccagctgagcacggtactggttcaccagcccggaaagccccgcatcccagtccagggatttgatgaccgcatcctgtaatgtcaggccgccgggaagattattttgtccggctgccgcagctgttgccgtgccggttgcggccggttgtgatttcggcaggttattctgaatagaacgctggcggatgatttctgtttcagatgcaaccgggtcgccggtcagcggtacgagcggtgccacagaaggtgcaggcgcagacgctaccacttttccggcaaccgcctgacgggccgggtactgaggtataccggcaggtttggcgggagcagccggtttgacttcctctccgctgtccccggtcagttcgggttcctgttcagcttccattgccgctctgtaaccaaagacacccagtgaaactgccgcaggaacctggtgtatataaataccggtcatgatggcggccacagaaagattgcgtataaaccaatttactttcactgctcagaccttatgctgacttataccggtgcaggggtatttccggccggaattatgataattaccaccatccgggctgcctgataaaacagccgtcagactgatgaatggcccggaagctcagcggcatcagaggcactgagcggaataagcagagaaaaaagaatctgttccgggataactgctgaacagcgctagcttatcaaaaagccgcagggatttttcggtgatagtaataacattaaatgttaacgtcaggccaaataacctgaataataatccgcaggcaaagaaatatatggcaataattttttattacctttaatacatcagcgtccgcaaataaaaaccgtaacatgttattttaaataacaataatgcaaacagattattacaacaaaaacatcattatacgatgaataatattagtattttattatccatcatataatgaccagtctgagaaaatgttcatgtcgtaataaaacgtaatcaccgtccgcagtaatgttttgctgcgttataaacgtctgtattcgggaataccgacagcttttccaccttactgatattctcattacgggtatccagcttacgggtgtaaataatacggtcattcatcatatacaccttggaaagctgatggccggaaaaattcaggcagtccagcgaccaggtatctactacccggttaaaaaacataccgttaggctttcctttatccgtcatctcaattttcttatcaccgatagtctgaaccataaacgaaaaggtgatattcagtgtgctgtccactttcgggctttctttagtgaaaaaaagactgaattcatttttctgatcgcggataccggaatcaacccactcggtttctgccacactgataatatcaccggccgcccccggttgtgatgcggcaaccgatgctgtttttaccgaattattgacaggctccggtactgatttaagaaacttttctgctgatgaaaaaaagctgacggctgacaatgataataaaagtacgccattcagtattatgctgtttgttctgttcataagtattcacatccctgttttatttcttccgtgaaacagagcctatccttaccataaccgggcaggataaatacaacagattccggatattctgcataaaattcagaaaatgccataatagttgtaatattaacggtaatataaaatacatatccggagattattatttccggttatattttcgtagctttatttattgtctttcccgccgagaaaaataatgcggtccgctgactcaatcgtcgattcgcggtgagcaatgataatccgcgtgatcggcaactg

SEQ ID NO: 107 - DNA, 594 bp, unknown
  Altogen 322075 strain
gataaccggatttatcagatggaattacaacagtccgagctgatgaaagagcaggtgaataatgatgcaggcggcgagattatcgtccgtgccctgacagacggccgtgtggattccctcggcgtaaccgtcggtcagatggtcaatcccggggataccttgctgcagatcctgccggaaaatatccgccagtactggctggtgctctgggtgcccaatgacgcactgccctatctgaatgtcggggatgcggtgaatatcccttatgaggccttcccggcagaaaaattcggccagtttgccgccaccattcaggtgatatccaaaacccccgcctccgcacaggaaatgatgacctatgccggggcgccgaaagtcagtcagatgccgcagtccattccctattacaaagtgattgtacgcccggaaaaacagatgatcgcctatgacggccgcgaactcagcctgcaaaatggcatgaaagccaattcccccccgtttctggagaaacgcaaaatctatcagtggatgatatcgccgttctatgacatgaagcagagcgcctccgggccaacaggagcagacacaccatga

SEQ ID NO: 108 - DNA, 155 bp, unknown
  Altogen 322075 strain
atgtttgctgaagatcccaaaaagaaggcggcagatatcgccgcactgaaagactctcttgttcaacaggcagctccgccggtgcagtcagcggcatcgctgctctcaggctattcaccttccggactggtatttacctgtaaaatcggccggtt

SEQ ID NO: 109 - DNA, 232 bp, unknown
  Altogen 322075 strain
taccgtgcagggactgctggcttctgccgaacagggcaacaccgacggcaacaaaacctggtatcactttctgatccgccctgaaatgtggattatgacgctgaatcaggacagccgtattttccagaaacaatctgttccggaagtgctggcaacattgcttaatgaagctcacgtcaaaaatgacctgaaattttatcaggaagagttgcatcagaagcgggattacatc

SEQ ID NO: 110 - DNA, 4119 bp, unknown
  Altogen 322075 strain
tgagagtagggaaccgccaggttttatatttaaagaaagccactcatctgagtggcttttttgcatttgcagtccgccaaaatacaaattcccgcagtgctgggatccgcgtctgcggactgataaactagacagcatatttgtcagatgagtttttcattatgtccctcaaacctgctgattcactccgccagttacatacatttggtatcgaagccggtgcccggcatattgatgtcgcagagaccatttctgatctctgccgcttatggctggctgcacaaacggaaaaatcccccttcctgctgttaggcggcggcagtaatatactgtttactgaggatttcaatggcaccgttgtcattaaccggatccccggcaagaccgtccgggaaacaccggatgcctggtttatcgaagttggtgccggcgaaaactggcatgaattaatccgctggatgctggcgaacagtatttacggcatggaaaacctggcgctgatcccgggctgtgccggtactgcaccgattcagaatatcggggcatacggtaccgaatttaaagacgtatgtgactatgtggatgtcacctctctgtcagacgggcagacaacacgcctgactgcagaggaatgtcgctttggctaccgtgacagtattttcaaacatgattatcagcagggatatgctatcacagcggtgggactgaaactgccgaaagtatggaaaccgaatctgagctacggtgatttgaaatcgctggatccagcgactgtcacacctcagcaggtatttgatatggtctgtcagatgcggatgagcaaactgccggatccggctgtaaccggcaatgcaggcagcttttttaaaaatccggttgtgactgctgagtgtgcgcagaaaatcaaagcacagtatccggactgcccgcagtatgtggtggcggacggaatcaaactcgctgccggctggcttatcgaccagtgtcagctgaaaggccatcaggaaggtggtgcagcggtgcatatgaaccaggcgctggtattgattaaccgtgataatgcaacaggtgatgatgttatccgtctcgcccgttatgtccgtcagcaggttgctgcccgtttcggggttcagctggagccggaagtccgttttatcggcacggacggtgaaatcagtgccacagaggctattgcatgaaagattacagtgtaccgctgacgctgattggcattttatccgacggtgagttccattccggtgaacaactcggcgataagctggggatgacccgggctgcagttaataagcacatccgcaccttacgtgagatgggtatagagatggaaacggtcaccggtaagggttaccgcctctttgcaccgatgaatctgttacagcccgatgttatccgcacgctgctgcccgggcgaaatgttgaagtgctgccggtcatcggctccaccaatcagcatatgatggataaagtgggggaattgacatctggtgatgcctgtgtggcggaataccagtatgccggacgcggtcgccgcgggcggcagtggatctctccgtttggccgcaatctgtatctttctctgtactggcgccttgagcagggacccgcagcggctatcgggctgagtctggtagtcggtattgtgcttgctgagacactgcatgagctgggtgcgaccggtgtaaaagtcaaatggccgaatgacttatatctggatgacaaaaaactggccgggatcctggtcgaacttcagggaaaaaccggggatgccgcgcatgtggttatcgggatcgggattaacctgaccatggaaagtagtggtacagatcagattggccagcagtggatcaatctgcagcaatccggtattcagatcgaccgtaatatattatctgcagagtttattaaacatctgacagatgcgttgcacttgttcgaaaaaagcggactgaccccgtttattgaacgctggtatgcttttgataattaccttaatcgtgaagtaaaactgattattggtgagcgtgaggtctttggcgtttccagagggataaacgggcagggtgctttgttattagatcagtttggtgaaattaccccctatatcggcggagaaatatcacttcgcggtgtgaattcaaaaaataaaccggcctgagccggtttatttttaacagaaaaactgattatttccgcagtttcacattggtcaccatatgattggtgcctttggtcatcaccaggctggcccgctctctggtcggcagaatattttcatgcagattcaggccgttaatctcatcccagattgttgaggcaatgctgacggcctcactttcctcaagttgcgcatagtgatggaaataggaattaggatcactgaatgcgccctgacggaatttcaggaaccgcccgatataccagctcttcagtaattcttccggcgcatccacataaatagagaaatccacaaaatcggacacgaacacatggtgcatggcttccggataatccatcccgctctgcagcacattcaggccttccaggatcacgatatccggctgctcaaccactaactgtttatccgggataatgtcataggtcagatgtgaataaaccggcgccagaacccgcggggtaccggatttcacttcagaaacgaaacgcaccagattatgcatgtcataggattcagggaatcctttcttcttcataataccgcgttcattcagcacagaattgggatgaagaaaaccatcagtggtaatcaaatccactttgcgatgttccggccagcggctcagtagcgcctgcaataaccgggcggtggtactttttccgactgacacactgccggcaataccaatcacataagggactttcgcttcatttctgccgaggaactgctccagtacggcctgacggcgcaggtttgagctgatatagaagttcagcagacgggacagtggcagataaatcgcgataacttcatcaatcgagatttcatcgtggataccgcgcagatcgtcaatttcctgctcagacaacgtcatcggaacggagttacgcagggtcgcccactgactgcggctgaaatggagataaggagagagcgatttttctttatacataaaccaacagctgcctttattacgcaggttggacaggtcattaatacccgtaccggctgaaaataaatcgcatcatagcgagagatgagagtcaggcgtagcaatttttttgaaaaaatgcattttttttgatgtcgcggacataaattacattgcacatgacataaacaaggagtcaaaaataagcggattattggtttttacggtagtccatctgtgtgattactgagagtttaagtgataagtatcgctgctaatttgtacattacctattgaaaaaaacagcaaaatacggaagaatgtccactttgtgagcaaaagaacaatttcagcgatttttttgttgcatcctgcgcaaagtctccatagaatgcgcagcacttgatgccggcatagctcagttggtagagcaactgacttgtaatcagtaggtcccgagttcgactcttggtgccggcaccatttaacaatttggaaaggtgggatacccaagcggccaaagggagcagactgtaaatcggccgtcacagacttcgaaggttcgaatccttctcccaccaccatctaatgtgaattattatcctgagtgttttactcaagactccttcgatgtaaaatactccggattcagttacagcagattaaagtcaggtagccgagttcacgcgggcatcgtataatggctattacctcagccttccaagctgatgatgcgggttcgattcccgctgcccgctccaagatgtgctgatatagctcagttggtagagcgcacccttggtaagggtgaggtcggcagttcgaatctgcctatcagcaccacttccgttgttctccattccttgatttttttccctgtaaatatccagacaagcaatactgcttggttgatgtggtgaaaccaccgattccgtgtcttagagggacaactaatgtctaaagaaaagtttgaacgtacgaaaccgcacgt

SEQ ID NO: 111 - DNA, 4753 bp, unknown
  Altogen 322075 strain
tcactgagcgggctttttcgtttctgctatccggtcatatctgctttcatttttcatgactgactgatttacaggcaaaaaatctgctttttgctgctatttcctgcaaagtgatcacaaacaaagcaaacgattcaaaaagtcatttttcattttgacaaccccccccccgccgcactactatgcaccccgcgttgaagatgttcctccatagttcagtcggtagaacggcggactgttaatccgtatgtcgctggttcgagtccagctggaggagccaacgtttacccctcttatttatttctctgttttatccgcaatatcccgtatcagacccggaacatataatgcgtgccgtccggcagctcaacatcaatattcagttttccgccgatggcatccacatagcgcctcagcgtggataacttgacatcacgccccggtttttccatcccggcgactgtcggctgttttattcccagtgcctgtaccatttccacctgtgttttcttcactttctccgccggtaacgcaaaagcgcaaattaacatggcatttaccggcgaatcgttctatcattcttttccggcttatggcacccgccatcaggttatcctttacttatttcggagccggttcaatgactcatcctgttacttccctgaaaatccgccgccctgacgactggcatatccatttccgtgatggtgcgatgctcggtactgttgtgcctttcaccagtgaatttttcgggcgcgccattgtgatgccgaacctggttccgccggtcaccaccaccgatgccgccattgcgtaccgtgaccgcattctggccgccgtaccgcaggggcacagtttcaccccgctgatgacctgctatctgaccgataacgcagacccggctgagattgaacgcggtttccgcgaaggtgtgtttaccgcctgtaagctgtatccggcgaatgcgaccaccaactccgcacacggcgtgtcagatatccgcaatatttatccggtgctggagatgatgtcccgcaatggtatgccgctgctggtacacggtgaagtgacacacgccgatattgatattttcgaccgtgaagcccgttttattgatgatgtgatgatcccgctgcgccgtgatttcccggcactgaaagtggtgttcgagcatatcaccaccaaagaagctgctcagtatgtgctggacggggatgataatgtcgccgccacactgacaccacagcatctgatgtttaaccgcaaccatatgctggtcggcggtgtgcgtccgcatctgttctgcctgccgatcctgaaacgtaatgtgcatcaggaagcactgcgtcaggcagtggccggcggctgcaaacggttcttcctcggcacggacagcgccccgcatgcccgtcaccgcaaagagtcctcctgcggctgtgccggggtgttcaatgccccgaccgcgctggccgcgtatgccacggtatttgaggagctgaacgcgctggagcactttgaagcattctgttcactgaacggcccggcgttttatggtctgccggtcaatgacggttttatcgaattaacccgtcagaaagtcatcaccccggaaaccattaacggcgcagaggatattttagtgcctttcctggccggaaccgatgcccgctgggatgttaaaatctgtcgttaagcaaaatagactagttataaacactcaggcttttagtgcaataaggtaaaaaccatcttattgcactactattatgttcagagaaggcgtttttgccgttttttgcataataaaagtctgatcccccctttttactttgcgaaaagaccttatactgatatcacccgttgttaacgggacgttagctcttagtcagagatacttaaccatcttgccgtatgattaggaggttccatgaacgataaaaaagccgtgatccagactcatccggttatcggatgggatatcagtaccgtcgacagttacgacgccatgatgctgcgcctgcattatctgcaggatcagtcccagtctcccgaacatgcagaagtggataaaactatgtggctgacgaccgatgtcgcccgccagttgattgacatacttcaggccggtatcgataaaattgaatccggcgaatattataatcagtcagacaatatcagacactgacacgcaaagactgcacaagagggacaccatctggtgtcctttgtgttttctgcggtaaaaaaaagaccacccggaggtggtcagaggtattgcattacgacttattataattgttggatgatgggttgaggcagacagtgttatcaggctgcggaaatccgttccactttcgccggcaatccctgccgcacagacgctccggttacccagtccagccaggtgttagccacctggcgggtcgggtcagcgaagccgaggtcgttgatattaataccggacgcgatgcgtttatccatcgccagcgcttcgccgtcaagatagtgctgacgcgcgcccatttcgtgatgtccgtaaccgtgttctatcgccaccacacccggcatcacaccggtcagcaggctgatctgcgcttcgacactgccgcccggcgtggtgatacgcaccagatccccgtgctgcacgccgaacttctcgccgtccgccgggttgatcgccaccaggtttgacggtttcacatggtgcaggcgctcaatcatggtggttgaactgctcatcacatgggatttaaaggacatcagtttcagcggccagctttccgccggatagacacggtcaatatcgctgccgtcagacaggcgcggcggataataggccggacaaccgctgaaacgctcgccggtgatggcatggcggttctgcgccacttccgcgttccagatctgcagcggctgtttccactgcggcccggttttctccccgtcccagcctttttcatacggtgcaaaacggccgccgcggctgaagagataagccacacggctgatttcctctgctttcagcacctgctgcatgacaggcataatgcgatccaccccggacagacggatatccgcctctttggcttccggccccggtttttcgcccataaaggcggtattggccgccacacgcagatagtaatcctccgccgtgttcagcggataagtgttgccgtcattgtccgcgatagcattatcaccgaatcccggcaggttcagggcttttgccaccgcaatacagaaggattccatcgctaccggctgaccatccgctgtttttgccacacgcggcgcaacaaccggccagcgggcagtggtggctttagtctgcacaccggaccacggcgcactgaatccccagctttcaaagttgtgggtatccggcacaatgtaatccgccagcgcggtggtttcattcataaaggcatcgataccgataatcagcggcagatgcgccgggtctttcagtttctcttccatcacctgacggatccccgcaatgccgtacagcgggttggtcatattggtgatccaggctttcagtttgtgcggatacccttccagtgcggagccgagctgctcggtcaactgaccggctgccagcggataccacggtgctttggccggatacgggttctgaccggcggaaaccttgtttttgtattcatcagatttttcatagactgacttactgcgcgccaggttcatgcctttcggcttcactttgcccgggaagctgtccattttgtagcacggcccgtcattggcgccgttaaacttgccgccgccgacagacacgccgcctttcaggttcatgttaccgatcagcgcattcagcatgatcactgcccaggcgttatagaatccgttaccggacatcatcccgccgtgggaaatgaccgccgcctgacgaccgtatgaggtcagtgttttcgccagtgcgccaatcgtttcttccggcacaccgcagcgggcactgtattctgccggggtaaaacgctgtgcggattctttcagcagcaggaaactgctcttcagattcaccgtggtgccgtctgccagcgtgaccggctgactgacttccagtaccgcacggtcgcaattgtccgccggaaccagctcaccctgctctgtcagtaccatatacaccggctcttcggatgtttgaccgctcagggcttcggctgtcagatgctgaccggccagcggatgtgcatcatcggtgatgacaagatgagtcgcgtttgtccagctgctctcaccgacacgcttcatggaggcttcccccggaacggcgagatactccgcgttatagcggttgttctcaatcatccagcggatcatacccatgaccagtgcggaatccgtgcccggtgtgattgggatccagtgtccgtggtcattggcaagcgtagtggtcagcggcagtgccggtgaaaccaccgcatagttaaagctgtcgcggatccgcgcattggccagctgacgcccctggcgtttgaacgggttaccggactgcgccggagaagtgccgaggaacagggcaaacttcacataatcccagtccggtttgacgtgggcgtttttgtccaggtcattcatcagcgcaccggaaccggcgcggtaggccagtccgcaataagcgccgtgtgcgccgaagtttttgctgccgaaggcattctgggcaaaacggcggataaaggtatcgcgcccgtcatcaccggcgttggtcaccagtaactgatttgcc

SEQ ID NO: 112 - DNA, 24778 bp, unknown
  Altogen 322075 strain
gatgggttaattccccgctgattattaaaaagagagctgcggctctctttttttatgcctgctttccggcaactgctgacaaaatttacacaatcgcaattgtaataatactgattatcatttactctttaccgcagtcaggaggaatgatatgtacgtatgtttatgtaatgccatcagcgataaagccatccggaatgccgtgcgccagaataaggttcattccatcggtgaactgcgtaaaattatccctgtcggcactgaatgcggcaaatgtatccgccacgccaaagccgttattgcagaagagcatatgtctgtcccggttgaccgcgtcgcctgaatcttctctctgaaacccgccggaattttgaactgtatcgctattttgtcaccgtaatcactccgtgaattatttcctgtgtctatactgaacagacaggaaacaaaggagggtacatgaaaggcgataaaaaaatgatctcgcatctgaacaaattgctgggaaatgaactggttgctattaaccagtattttctgcatgcccgcatgttcaaaaactggggtctgattaaactcaacaacaaagagtatgaagaatccattgatgagatgaaacacgctgatgaatacattgagcgtatcttatttctggaagggatcccgaaccttcaggatctcggtaaacttcatatcggcgaagatgttgaagaaatgctgaagtctgatcttcagctggaactggatggcgccaaagatttacgtgaagccattgcctatgccgattccaaacatgattatgtcagccgtgatttgatgataaaaatactggcggaagaggagtctcatatcgactggctggaaacccagctggatctgatagcccgtgtgggtctgcagaactatcagcaggcacagatggcggacgcagacacagaataaaaaacagagaaataatcactgaagtaagcaatgtgcagaaccgccggcagggaaacccgcggcggtttttcttttttgattttttgtcatggcgccggagataatttgcacaaatcccggtttgcggcttgctttcagggctcattcacgtataatgcgcgggcttgccaattgtgcaagcctggttgataccagcattggacagtatgttttttcgctgttcatgaaaatatccccgatatggggattacatcgagaacgattacactcccccgtcaatcgaaatgggtgcgaggagtaattttttacgtttataaaatagttggagctctggtctcatgcagaaccaaagaatccgtatccgccttaaagcttttgatcatcgtctgatcgatcaatcaactgcggaaatcgtagagactgctaagcgcactggtgcgcaagttcgtggtcctatcccgctgccgacccgtaaagagcgttttaccgttctgatctctccgcacgtcaacaaagatgcgcgcgatcagtacgaaattcgcactcacaaacgtctggttgacatcgttgagccaactgaaaaaaccgttgatgctctgatgcgtctggatctggctgccggcgttgacgtgcagatcagcctgggttaatcaggtatcaattgattgagaggttgaaacaatgattggtttagtcggtaaaaaagtgggtatgacccgcatcttcactgaagaaggtgtgtcaatccctgttactgttatcgaaatcgaaaataaccgcgttactcaggttaaatctgacgaaactgacggttatcgtgctattcaggttaccaccggcagcaaaaaagctaaccgcgtgaacaaacctgaagcaggacatttcgcaaaagctggtgttgaagctggtcgcctgttacgtgaattccgcctgtcagaaggtgaagagtttactgttggccagaacatcagcgttgaaattttcgctgacgttaagaaagttgacgttactggtacatctaaaggtaagggcttcgccggtactgtaaagcgctggaacttccgtactcaggatgctactcatggtaactccttgtctcaccgtgttccgggttctatcggtcagaaccagactccgggtaaggtatttaaaggcaagaaaatggcaggtcagctgggtaacgaacgtgtaaccgttcagagcctggatgtcgttcgcgttgacgctgagcgtaacctgctgctggtaaaaggtgctgtcccgggtgcaaccggtagcaacctgattgttaaaccagctgtcaaggcttaacgtcgaggagataggaatggaattggtaatgaaagacgcgcaaagcgcgctgactgtttccgaaactaccttcgggcgtgatttcaatgaagcgcttgtccatcaagtagttgttgcgtatgcagctggtgctcgtcaaggtacacgtgctcagaaaactcgtgctgaagttactgggtctggtaaaaaaccatggcgccaaaaaggtactggtcgtgcccgctctggttcaatcaagagcccaatctggcgctctggtggtatcactttcgcagcgaaaccacaggaccacagtcaaaaagttaacaaaaagatgtaccgcggcgcgctgaaaagcatcctgtccgaactggtacgtcaggatcgtctgatcattgtcgaaaaatttgctgtagaagcacctaaaaccaagttgctggtacagaaattgaaagatatggctctggaagacgtgatgatcgtcactcacgaagttgatgagaacctgttcttagcagctcgcaacctgtacaaggttgatgtgcgtgatgtcactgcaatcgatccggtcagtctgatcgcgttcggtaaagtagtgatgactgctgaagcagttaagcaagttgaggagatgctggcatgatccgtgaagaacgtctgctgaaagtactgcgcgcgccgcatgtatctgaaaaagcgtctaccgcgatggaaaaaacaaataccatcgtgctcaaagttgctaaagacgcgactaaagctgaaatcaaagctgcagttgaaaaactgttcgaagtcaaagttgaaggtgttaacactctgctggttaaaggcaaagtgaagcgccacggtcagcgtttcggtcgtcgtagcgactggaaaaaagcttacgtcaccctgcaggaaggccagaatctggacttcgtcggcggcgctgagtaagtcggaggagtaaagaacaatggcaattgttaaatgtaaacctacgtctccgggccgtcgccacgtcgttaaagtggttaaccctgagcttcacaagggcaaaccttacgcaccactgcttgagaaaaacaacaagtctggtggtcgtaacaacaatggccgtatcactacccgtcatattggtggtggtcacaagcaaaattaccgtattgttgactttaaacgtaacaaagacggtatcccggctgttgtagaacgtctggaatatgatccaaaccgttcagcaaatattgctctggtattatacaaagacggtgaacgccgttacatcctggctcctaaaggcctgaaagctggtgatcaaatccagtctggtgttgatgctgcaatcaaagcgggtaacgctctgccaatgcgcaacatcccggttggttctactgttcataacgtagaaatgaaaccaggtaaaggcggccagctggcacgttctgccggtacttacgttcagatcgttgcgcgcgatggtgcttatgtcactattcgtctgcgttccggtgaaatgcgtaaagttccttcagattgccgcgcgactttaggtgaagtgggtaacgctgaacacatgctgcgcgttctgggtaaagctggtgcaagtcgctggcgtggtattcgccctaccgttcgcggtactgcgatgaacccggtagaccacccacatggtggtggtgaaggtcgtaactttggtaaacaccctgtaacaccatggggcgttcagaccaaaggtaagaagactcgtaaaaacaaacgcactgaacacttcatcgttcatcgtcgtactaagaaataattagaggataagccatgccacgttctctcaagaaaggtccttttattgacctgcacttgctgaagaaggtagagaaagcggtggaaagcggtgacaaaaagcctgttaagacttggtcccgtcgttcaacgatctttcctaacatgatcggtttgaccatcgctgtccataatggtcgtcagcatgttccggtttacgttaccgacgaaatggttggtcacaaactgggtgaattcgcgccgacccgtacttatcgcggccatgcggctgataaaaaagccaaaaagaaataaggtaggaggaagagatggaaactattgctatgcatcgccacgctcgttcttctgctcagaaggttcgcctggtggctgacctgatccgcggtaagaaagtgtcgcaagctctggaaattttaacctttaccaacaagaaagctgctggtttagtgaagaaagttctggagtctgctattgctaacgcagaacacaacgatggcgctgacatcgatgatctgaaagtagcgaaaattttcgttgacgacggcccaaccatgaagcgcatcatgcctcgtgctaaaggtcgtgcagatcgtattcttaagcgcaccagccacatcactgtggttgtgtccgatcgctgatacctggagactagcaatgggtcagaaagtaaatccaaatggtattcgcctgggtattgttaaaccttggaactctacctggtttgcgaacaccaaagaattcgctgacaacctggacagcgactttaaagtacgtaagtacttaactaaagaactggaaaaagcgtcagtatcccgcatcgttatcgagcgccctgctaagagcatccgtgtgactattcacactgcacgccctggcatcgtgatcggtaagaaaggtgaagacgttgaaaaactgcgcaaaagcgtttcagatatcgctggcgttcctgcgcagatcaatattgccgaagtacgtaaacctgaactggacgcaaaattagttgctgacagcatcacttcacagctggaacgtcgcgttatgttccgtcgtgctatgaagcgtgcggtacagaatgctatgcgtttaggcgctaaaggtatcaaagtcgaagtcagcggccgtttaggcggtgctgaaatcgcacgtactgagtggtatcgcgaaggccgtgtgcctctgcataccctgcgtgcagacatcgattataacacctctgaagctcagactacttatggtgttatcggtgttaaagtgtggatcttcaaaggtgagattctgggtggcatggctgcagttgaacaggcggaaaaaccggctgctcaacctaaaaaacagcagcgtaaaggccgtaagtaaaggagagtcgctgaatgttacaaccaaagcgtacaaaattccgtaaagtgcacaaaggccgtaaccgcggtctggcagcaggcgcggatgtgagcttcggcacttatggtctgaaagctgttggccgtggtcgtctgactgcacgtcagatcgaagcagcacgtcgtgctatgacccgtgcagttaagcgtcagggtaaaatctggatccgtgtgttcccggacaaacctatcactgaaaagcctcttgaagtgcgtatgggtaaaggtaaaggtaacgtggagtattgggttgccttaatccagccgggtaaagtcctgtatgaaatggacggcgtatcggaagagcttgctcgtgaagcattcaagctggcagcagctaaactgcctatcaaaaccacctttgtaactaagacggtgatgtaatgaaagcgaaagagctgcgcgaaaaaagcgttgaagagctgaacactgagctgctgaacctgctgcgcgaacaatttaacctgcgtatgcaagcggcaagcggccagttacaacagtctcatctgttaaaacaagtgcgtcgtaatattgcacgtgttaagactttattgactgagaaggcgggtgcgtaatgaccgataaaatccgtactctgcaaggtcgtgttgttagtgacaaaatggagaaatccattgttgtgactatcgagcgtatggtgaaacaccctctgtatggtaagttcatccgtcgtacgactaaactgcacgtacatgacgagaacaatgaatgtggtatcggtgacgtggtagaaatccgcgaaacccgtccactgtctaagactaagtcctggaccctggttcgcgtcgtagagaaagctgtactgtaacagcactgctttctgatgtagaataaacggctcggctttagagccgtttatttttttctatccataacgaagatgtggtgttataatgccgcgccctcgtaatatgggtatttggacggcctctctttttagtaagagtggctcagtagtagttgacatttagcggagcactaaaatgatccaagaacagactatgctgaacgtggccgataactccggtgcacgtcgcgtaatgtgtatcaaggttctaggtggctcgcaccgtcgctacgcagctgtaggcgacattatcaaaattaccatcaaggaagcaattccgcgcggtaaagtaaaaaaaggtgatgttctgaaggcagtagtggtgcgcaccaagaagggtgtacgtcgccctgacggttctgtcattcgcttcgatagcaacgcttgtgtattgttaaacaataacagcgagcaagttatcggtacgcgtatttttgggccggtaactcgtgaacttcgtaacgagaagtttatgaaaattatctcactggcacctgaagtactctaaggagcggaactatggcagcgaaaatccgtcgtgatgacgaaattatcgtgctgaccggcaaagataaaggtaagcgcggtaaagtaaaacaggttctttcttctggtaaagttatcgttgaaggtatcaatctggttaagaaacatcagaagccggttccggccctgaaccaaccaggtggcatcgttgaaaaagaagctgcaattcaggtttctaacgttgcaatcttcaatgcggcaaccggcaaggctgaccgtgtaggttttagattcgaagacggcaaaaaagtccgtttcttcaagtctaacagcgaaactatcaagtaatttttggagtatacgatggcgaaactgcatgattactacaaagacgaagtagttaaacaactgatgactcagtttaactacaattctgtcatgcaagtccctcgggtcgagaagatcaccctgaatatgggtgttggtgaagcaattgctgataaaaaactgctggataacgcagcagctgacttagcagcaatctctggtcagaaaccattgatcaccaaagcacgcaaatctgttgcaggcttcaaaatccgccagggctatccaatcggctgtaaagtaactctgcgtggcgaacgcatgtgggagttctttgagcgactgatttctattgctgtaccacgtattcgtgacttccgtggcttgtccgctaagtctttcgatggtcgcggtaactacagcatgggcgtacgtgaacaaatcatcttccctgaaatcgattacgataaagtggatcgtgttcgtggtcttgatattactatcactaccaccgcgaaatctgatgatgaaggtcgcgcactgttatcagcgtttaacttcccgtttcgcaagtaaggcagggtattcatggctaagaaatctatgaaagcacgtgatgtaaaacgtgcaaaattagctgagaaattcttcgcaaaacgcgcagaactgaaagctaccatctccgatgtcaacgcatcagatgacgatcgttgggatgctgttctgaagcttcaatctctgccacgtgattccagtccttcccgtcagcgtaaccgttgccgccaaaccgggcgtccacacggttttctgcggaagtttggcttaagccgtattaaagtccgtgaagccgctatgcgcggtgaaatcccgggccttaagaaagctagctggtaattgtcaccatattgaatcacgggagtaaagacagatgagcatgcaagatcccatcgcggatatgctgacccgtatccgtaacggtcaggccgcgaacaaagttgcggtcaccatgccttcctccaagctgaaagtggcaattgccaacgtgctgaaggaagaaggttatattgaagattttaaaatcgaaggcgacatcaagccagaactggaactgactcttaagtatttccagggtaaggctgttgtagaaagcatccagcgcgtaagccgcccaagtctgcgtatttataagcgcaaagacgaactgccacaagttatggcaggtctgggtatcgcagttgtttctacatctaaaggtgtaatgactgatcgtgcagctcgccaggctggtcttggtggcgagattctctgctacgtagcataattcgggaggaaagaatgtctcgtgtggcaaaagcacccgtcgtcattcctgccggcgtagaggtaaaactcaacggtcaggttatttcgattaagggtaaaaacggcgagctgagccgtaatatccacaacgctgtagaagttaaacatgcagacaaccagttaacctttggtccgcgtgacggttataccgacgcatgggcacaggctggtacaactcgtgcactggttaacgctatggttgttggtgttaccgaaggcttctctaagaagctgcaactggtaggtgttggttatcgtgcagccgttaaaggtgatgtagtaaacctgtctgtaggtttctctcacccggtagagcacaaactgccggctggcgttactgctgaatgtccgacccaaactgaaatcgtactgaaaggtgctgataagcaggttattggtcagatcgcagcagacttacgcgcctatcgtcgccctgaaccttacaaaggtaaaggtattcgctacgccgacgaagtcgtgcgtattaaagaggctaagaagaagtaaggtaacactatggataagaaagcagctcgtatccgtcgtgcgacccgcgcacgccgcaagcttatggaactgggtgcaacccgcctggtggtacatcgtacccctcgccatatctatgcgcaggttattgcaccaaacggttctgaaacgttggtggccgcttctactgttgaaaaagctatcagcgaacaagttaaatacaccggaaacaaagatgccgcaatcgcagtaggtaaagctattgctgagcgcgcgctggaaaaaggaatcaaagcagtatcctttgaccgttcaggtttccaatatcatggtcgagtccaggcactggcagatgctgcccgtgaagctggcctacagttctaaggtagaggtgtaagatggcacacatcgaaaaacaggctggcgaactgcaggaaaagctgatcgcggtaaaccgcgtatctaaaaccgttaaaggtggtcgtatctttagcttcaccgcactgactgtagtgggtgatggcaacggccgcgttggttttggttacggcaaagcacgcgaagttccggcagcaatccagaaagcgatggaaaaagcccgtcgcaacatgaaaaccgttgcacttaacaacggcacattattccacccagtgaaaggcacacacaccggttcccgcgtgtttatgcagcctgctcacgaaggtaccggtattattgccggtggtgcaatgcgtgctgttcttgaagttgccggtgttcgtaacgtcctggctaaaacttatggttccacgaacccaattaacgttgttcgtgcaacactggatgctttagacagcatgaagtctccggaaatggttgcagctaagcgtggtaaatccgtcgaagaaattctggggtaatggaccatggctaagacaattaaaattacacaaacccgcagctcaatcggccgtctgccaaaacacaaggcaactctggtcggtttaggtctgcgtcatattggccacactgtagaacgcgaagatacaccagcggtccgtggtatggttaatcgtatttcctatatggttaaagttgaggagtaacagatgcaattaaatactctgtctccggcagcaggtgctaaacacgcaccaaaacgtgtaggtcgtggtattggttccggtctcggtaaaaccgcaggtcgtggtcacaaaggtcagagctctcgttctggcggtggcgtacgtcgtgggtttgaaggtggccagatgcctttatatcgtcgtctgccaaaattcggctttacttcacgtaaagcgatggtcactgctgagatccgtttatctgatcttcagctgatcgaaggcgatgttatcgatcttaatgtattgaaagccgcaaacgttattggtccacagattgagtacgcgaaagtgttcctgtctggtgaactgactcgtgcagttactgtacgcggcctgcgtgttactaaaggcgctcgtgctgttatcgaagctgctggcggtaaaatcgaggaataagtaacagatggcaaagcaaccaggtacagatttccaaagtgctaaaggcggaataggtgagttaaagcgtcgtttactgtttgtgctcggcgcactgattgttttccgtattggctctttcattcctatccctggtattgatgccactgttcttgcgaaattgctcgaacaacaacaaggcaccatcattgagatgtttaacatgttctctggtggtgcgttgagtcgtgcttcaatctttgcgctgggtatcatgccgtacatttcggcatcgattattatccagctgctgagcgtggtgaacccgcgcctggcggagattaagaaagaaggggaagctggtcgtcgtaagattagccagtacacccggtatagtacgttagtcctcgcggtgttccagtctgttggtatcgcgatgggcttaccgaatatgcctggtatgcagggtctggttattaacccgggctttgcgttctacttcacggctgttgtgagtttggtgacagggactatgttcctgatgtggctgggtgagcagattactgaacgcggtatcggtaacggtatttcgatcattatcttcgccggtattgttgcgggtcttccgtcagcaattggccataccattgagcaagctcgtcaaggcgaactgcacttcctcctgttgctattggttgcagtcttggtatttgcggttacttgctttgttgtctttatggagcgtggtcagcgtcgtatcgtcgttaactatgccaaacgtcagcaaggccgccgtgtttacgcggcacaaagtacacacttaccgttgaaagtgaatatggcgggtgtaattcctgcgattttcgcttccagtattatcctgttccctggtacaattgcatcttggttcggtgatggtactggctgggattggctgacgacaatttctatgtatctgcagccaggccagccgctctatgtgttactttatgcctctgcaatcatattcttctgtttcttctataccgcactggtatttaatccaagagaaacagcagataacctgaagaagtccggtgcatttgtaccaggaattcgtccgggagagcaaacggccaagtacatcgataaagtaatgactcgtttaactttagttggcgcgttatatattacctttatctgcctaatcccggagttcatgcgtgacgcaatgaaagtacctttctactttggtggtacttccctcttaatcgtggttgtggtcatcatggactttatggctcaagtgcaaactctgatgatgtcaagtcagtacgagtctgcattgaaaaaagcaaacctcaaaggttataaccgttaattcggtttgctttagaagttacggagagtaaaaatgaaagttcgtgcttccgtcaagaaattatgccgtaactgcaaaatcgttaagcgtcacggtgtcgtgcgcgtgatttgcagtgctgagcctaagcataaacagcgtcaaggctaataaaaagcatatttttcttgcaaagttggattgagctggctaaattagccagccaatctttttattaaacgtggttctactgtttgagtatcctgaaaacgggcttttcagatcagtattaccccaaaatttttaggagtgcatagtggcccgtatagcaggcattaacattcctgatcataaacatgctgttattgcattaactgcaattttcggcatcggcttaacccgttcacaggctatctgtaaagcaacgggtattgctgaagatgttaagatcagtgagctgtctgaagagcaaatcgaccaactgcgtgacgaagttgctaaatacgttgtagaaggtgacctgcgccgtgaagtgaccctcagcatcaaacgtcttatggacattggttgctatcgtggtttacgccatcgtcgtggtcttccggtacgcggtcagcgtacgaagactaacgcacgtacccgtaagggtccgcgtaagccgatcaagaaataatcggggaatcttataatggcaaaagcacctgttcgtgcacgtaagcgtgtaagaaaacaagtctctgacggtgtggctcatatccatgcttctttcaacaacacaatcgttaccattactgaccgtcagggtaacgcattaggttgggcaactgccggtggttccggtttccgtggttctcgtaaatcaactccattcgcagcacaggttgcagcagaacgttgcgcagaggctgtgaaagagtacggtattaagaatctggaagttatggttaaaggacctggtcctggccgtgagtcaaccgttcgcgcattaaacgcggctggtttccgcatcactaacattactgatgtgactccgatccctcataacggttgtcgtcctccgaaaaaacgtcgcgtctaatcgccctcacgttttttaggatagttggagaaagaaaatggctagatatttgggtccgaagctcaagctgagccgtcgcgaaggaacagacctcttcctgaagtctggtgttcgcgcgattgacaccaagtgtaaattagatcaagcaccaggccagcacggcgcccgtaaaccgcgtctgtctgattatggtgttcagttacgtgaaaaacaaaaagttcgtcgtatgtacggcgtgctggaacgtcagttccgtaactactataaagaagcaactcgcctgaaaggcaacacaggtgaaaacctgctgtctctgctggaaggccgtttagacaacgttatttatcgtatgggctttggcgctacccgcgcagaagcacgtcagatcgtcagccacaaagctgtcatggtaaatggccgtgttgtaaacattgcttcttatcaggtttcccctaacgacgtaatcagcattcgtgaaaaagcgaaaaaacagtctcgtattaaggctgctttagagctggctgagcagcgtgaaaaaccaacttggttggaagttgatgctgcgaaaatggaaggtgtgttcaaacgtattcctgagcgtactgacctttctgctgatattaacgagcacctgatcgtcgagctttactctaagtaaggcttagcaccaaagagaggacacaatgcagggttctgtgacagagtttcttaaaccgcgcctggttgatatcgagcaaatcagttcgacgcacgccaaggtgacccttgaaccattagagcgtggctttggccatactctgggtaacgcactgcgccgtattctgctttcgtctatgccgggttgtgcggtaactgaggttgagattgatggtgtactccatgagtacagcactaaagaaggtgtacaggaagatatcctggaaattctgctcaacctgaaagggctggcggtaaaacttcagggaaaagatgaagtcatcttaactctgaataaatctggcattggccctgtgactgcagccgacatcatccatgacggtgatgttgaaatcgtcaagccggagcatgtaatttgccatctcactgacgaaggcgcatctattaatatgcgcatcaaagttcagcgtggtcgtggttatgttccagcttctgcccgaattcattcggaagaagatgagcgcccaatcggtcgtctgttagtagacgcgtgctacagcccagttgagcgtattgcttacaatgttgaagcagcacgtgttgagcagcgtaccgacttggataaattggttatcgaaatggaaaccaacggcacgattgatccagaagaatcaattcgtcgtgcggcaaccattctggccgaacaactggaagctttcgttgacttacgtgatgttcgtcagccggaagtgaaagaagaaaaaccagaattcgatccgattttactgcgcccagtagacgatctcgaattgactgtccgctctgctaactgtctcaaggcagaagcaatccactacatcggtgatctggtacagcgtacagaagttgagttgctcaaaacccctaacctcggtaagaaatctcttactgaaattaaggacgttctggcatctcgcggcttatctctgggcatgcgtctggaaaattggccgccggcaagtattgctgacgaataagatcacaggttaaggttttactgagaaggataaggtcatgcgccatcgtatgagtggtcgtcaattgaaccgcaacagcagccatcgccaagctatgtttcgtaacatggccggttctttagttcgtcacgaaattatcaagacgactttgcctaaggcaaaagaactgcgtcgcgttgttgagccgttgattaccctggctaaaacggatagcgttgctaaccgtcgtttagcattcgcccgtactcgtgataacgaaatcgtggcaaaactgttcaacgagctgggaccacgtttcgctcagcgtgcaggtggttacacccgcattctgaaatgtggtttccgtgctggtgacaatgctccaatggcttacattgagcttgttgaccgcgctgaatcccagactgaagcagcagcagagtaatctgttactgcgtaaaaaaaccgggtttttacccggtttttttatttctgttaatcctgcccttgaagttactcccctcatccccatatctctgccaatgacatacaacattttactattctgatatgatggcttcgggccagaagatgtcaggaggttgccgatgtaccgaattggtcagttagcaaaacttgcagaagtgacaccggatacaatccgtttttatgaaaagcagggcatgatggatcatcagacccggacggatggcggctatcgtttgtatactgagcaggatctgcaccggctgcgttttatccgctatgcaaaacaattagggtttaccctggaagcgatcacggaactgttatcgatccgggttgatcctgaacatcacacctgccgtgaatcaaagcaaattgtggatgatcggctgaaagatgtggaaatgaagttagtcgaaatgcagcgaatgcgggattctctgaagatgctgagtgatgcctgttgcggaacggcacatgtcagttcacaatgcaccattctggagatcctggaacaaggcgcgacagaaccctgtggctgttcacacaaagagagtaaacataatcaatgaggttactatgacaaaatatgctcacaagcgtggcgtaatacaagataacgccctggaagcactgctatccgatccgttgttccggcagagagtagaaaaaaataagaaaggtaaagggagttacaaccggaaagaaaaacacaacaaggcaggttaccgggaggccagtagtaagcgattagataatcttttactactggccttttagtttattatttcttttgttcttttaataaatcacggatttcagtcagtaatgtttcttctgctgacggtgccggcggctccgcaggtgcttcagcctgttcgcggcgtaatttattcagcattttgatggcaatgaagatagcaaacgcaacgataacgaaatcaaagacggtttgcaggaatacaccataatttagtacaacagcaggcacatctccgcttgcttcccgcaacaccacggcaaattgcttgaagtcgatcccgccgatcagtaaaccgagtggtggcatgatgacatcagcaactaatgaggacacaattttgccgaatgccgcaccgataatgataccgacagccatatcaacgacattgccgcgcatcgcaaattcacgaaactcttttatgaagctcatacccttttccttacccaaaatgttaacaagttgtcattctcaagtataaatcaatagtatttactatcaaaatattaagtacttatttataagaagaacggacttggctggaagagcttctccacctcgggtacgtggcgtttgtcagtaatgaacagcacgacatggtctccctgttcaatactgtgctcgtcattcgcaataataacctgctcatctctgacaatcgcaccaataatagtgcccggcgggagcttaatatcggcaattttacgtccgacaacttttgacgtattttcatcgccatgtgcgatagcctcaatcgcctcagcaacaccgcgtcgtaatgacgatacactgacaatatctgctttacgcacatggccgagtaatgcagaaatggtggcctgctgcggggagatagcgatatcaatcacaccaccctggaccagatccacataggcactgcgctggataagcaccattgctttcttggcccccatgcgcttggcgagcatcgcggacataatattggcttcgtcatcgttggtcagggcaataaagacgtcaacctgctcaatatgttcttctgctaataattcctggtcagatgcatccccgtaaaaaacaatagtgtcatgcagcagctcagcgaggtcggttgcccggttggcgttgtgctcgatcagtttgacgttatagtctttctcgatacgcagtgccagaccggcgccgacgttcccgccgccgacaatcatgatccgcttatacggtttttccagacgctgtaattcactcatcaccgcacggatatgctcggatgcggcgacaaagaatacttcatcaccggcttcaatgatggttgaaccctgcggacgaattggtctgtcctgacggaagatggccacaacccgtgtttcaatatgcggcatatgctcgcgcagactggaaagggcatttccgaccagagagccgccgtagtaagctttcacggcgacaatactgacgcgcccttcggcaaaattcacaacctggagagcaccggggtactgaatcagcttatagatgctgtcgatcaccaactgctccggagcgatcaggtgatcaatcgggatcgcttccggtaaaaataatttatcagcttcccggacatattcagaagatcggatacgggcgatcttattcggcgtgttgaataaggtgtatgcaacctggcaggcgatcatattggtttcatcggagttggtcaccgcgacgagcatatccgcgtcttccgcacccgcttcacgcaatacccgcggatgagaaccggcaccgtttattacccggagatcgaatttatcctgtaactgacgcagcctgtccgggttggtatccacaacagtaatatcgttgttttcatccactaagttttctgccagtgtgccgccgacctggccggcaccgagaataataattttcatataaatgatcgtccgggttgtttatcaggcaggaagtgcctgtttaaccagtttagcgtaaaaaaatccgtctccgctctgcgcatccggcagcatctggtagcctgttgccggtgtatcggttaatacagcatcacggtgcgaagagagaaaattatttatctgatgaatattctcttccggtaatactgagcaggttgcatagaccagtgtgccgccgggtttgagataaggccagacagcgtccagaatttcccgttgcagtgccgccagctcattgatgtcattatcacggcgcagccatttgatatccggatggcggcggataacgccggtcgcggagcaaggtgcatccagcaaaatgcgatcgaatggctgtgattctgcccattcttccggataacggccgtcaccggctttcaccaccgcgttttgtttaagccgttgtaaattctcattaacccgggttaaacgctgtttatccacatcaacagccatgacatgagcgcggggcgctatctctaaaatgtgggtggtcttcccgccgggtgccgcgcacaaatctaaaatagtctcatcattctgcggatcaagtagtaatgcacagccctgcgcggaactgtcctgcacggtggcccagccatcagcaaacccgggcagatcagtgaccgggcaggggactgccagacgcagtgcatccggatatgccggattataaaaggcttcaatatccttttctgccagcagcacctggtattcctgagcagtgtggtggttacggttaacgcgcagccacatcggcggtttttcattatttgccgtaataacagcttcccagttgtcaggatatgccgcctgaatccgcgacagcagccatttcggatgcagccagcggctttcattattagcaaaacgttcggacagcacctgctcctgacgctggaactgacgcagcactccgttaatcagtcctttcagctgtggttttttcagtgccacagcaccgtcaaccgtttcggatagtgcggcgtgtgccgggatccgtgtataacggagctgataaaaaccgaccagaatcagataatgcagtacccgctgcttaccggtcagcggttttgccatcagctgctggctgtaccattcaagctccggcagtacccgcatcacaccaaaacataattcctgcagcaatgctttatctttcgggttgatatcccgctgatattcaggcagaagtgcgctgagtgactgtccctgatccaggacctggctgatgatacgggcagcaatgctgcgtaagttatagctgtttttcattgtgattccggtatgccggcaagcgataaagagaaagggggaccggcataccacgcagggaatgccggttatgaaacaaaattacagtgaatttcccggggtaaaccattctttgcgggaattcagaatatcagcggctgacatcggttttttcccggcaggctgtaactgtgtgatattcaggatcccttctgcagtggcaacctgaatgccatttttatccgcacggataaccgttcccggcgctgcggaagtctgttccgcaatcgcatgggcctgccagactttcaccggttgctcatcaatcaccatataactgattggccacggattgaaggcacgtatacagcggtctaactgtgcggcagaaagagaccagtccagccgggcttcttctttgctcagtttttctgcataggtaaccagggtgtcatcctgtttttcagggcggagtgcattctgacacaccagagacagtgtatgtaacagtgcctgcgggccgataccggcgagtttttcatacagtgacgcactggtatcttctgatgtgatatcacactcagctttatacagcatatcgccggtatccaggccggcatccatctgcatgatggtcacaccggttttggtatcaccagcccacaatgcacgctggataggcgccgcaccacgccatgccggtaacagggaaccgtgaacattcaggcatcccagacgcggaatatccagcactgcctgcggcaaaatcatcccgtaggccacgacaatcataatgtccgcctgctggtcacgtatccactggtgattttcttctttgcgcagcgtggagggctggaaaacaggaatatcgtgctgctgtgccagttcttttaccgggcctgcggtgatttttttcccgcggccggcagggcgatccggcatggttaagacgccaacgacattgtgctctgactgaatcagggcatcgaggtgacgtgcggcaaaatcaggcgttcctgcaaagataatacgtaatgaatctgacacgttgctttcctgtaaaaataataatgccacaaacaataacagtgcccgtgcgctgctgcggtctgtggcagataaagactgcgggtattaagaccgggctctgagtctgtccagtttttcgactttctgacggatgcgctggcgtttcatagcggaaaggtaatcgacaaataatttaccttccaggtgatccatttcatgctggatacaaattgccagcagatcgccggtttccagctcgaaaggctcgccgttatagtccagcgcccggattttaacgtgctcggcacgcggtacgaatgcccgctgctcaggaatcgataaacaaccttcttcgattccggcttctccggatttttccagcagttccgggttgatcagcaccaggcgctcattccgctcttctgacacatcaatcacgataatgcgctggtggatatcaacctgagtggcagccagaccaataccttcttcgtcgtacatggtttcgaacatatcatcgacaatcttctgaatgccggcatcgactttttcaaccggctttgcaatcttgcgaagccgctcgtcgggataatgtaatacagttaataacgccatagattttttcgtgttctatctaaaaaatggatggaaattaatgtctattctagacagttatcagcctgattgacagtattgcccgcagcggacaccgcatttttatcacaggctcagtcaggatggcgcaatggatgaaagggaaatttggttacgtctggcgtgtatcaggcggttaagtgcacatcatgctgtcagtgctgccacaatactgacagagacctgcacacagaaaaacggtgagatccgccgccagttacatcagtgcggacttacactggtacagtgtcagcaattcatgaatgtgaatacatccaggctgaaaacggcacttatatgggctgattcaccgggtaacatgatattacctctgtcatcaccacactatccgtttttattaaagcagatctattcacccccgcttgtgctttttgtggcaggacagtgtgaggtgttatctgccccgcaggtcagtatggtgggcagccgcgcagttacccattacggcgaaaagtgggcggactgttttacccggcatcttgtgcagcacaatctggtgataaccagcggcctggctgcgggcgtggacggatgctgccataaggcggcgctggcatcaggcggaaagacggttgcggtatccggcagcgggctgtctcatatttatcccgcaaagcaccggtcgctggcagaggagattacagaaaatggcgcacttatctctgaatactttccggatgtgccgccgctggccaaaaactttccccgccgtaacaggataatcagcgggttaagccgtctgctgattgtgattgaagccggacggcgcagcgggtcattaattacggcacaatgcgcactggaacaggggcgggatgtatttacgttaccggcggtgcttggtaatccggcggatgagggtaatcactggttgttgcagcagggcgcctatattgcgacagcaccggctgatatcacggatcatctcgcgctggatatgcagtggctgccgctgccgccggccacggaagcaccggaagtgattatcacaccggtacaggaggaactgccgtttgcacatgtgctgattaatgtggatgatgaaccgacaccggcggatatcatggccgctcggtgtgagctgccggtcacagaggtgacaacacaactgctgcagctggagttatcaggtaaaatagccgtggtcagcgggggatatatccgcctgcatcactgaatggtatcggtgtaaggtaaaattatcatgtcaaaatcaacggcggaatgttgtccggaatgcggcggagaactggttatccgtaatggtgcccacgggccttttttcggctgttctgcttatccggaatgtgattacatccgtccgctgaaagccggtactgacgggcatatcatcaaagtgctggacggacagttgtgcccgcagtgcggcgggacgctggtgctgcgccaggggcgctacgggatgtttatcggctgcggaaattttccggaatgtgaatatattgcatctattgattctccggatgaaacgacagtggcctgtccgcagtgtcatgatggtaagttacttcagcgtaagtccagattcggtaaagttttttatgcctgtaaccgctatccggcctgtcagttttcactgaacagcaaaccggttgccggtgagtgtcagtattgcggttatccgctgctggtggaaaaaaggacatcaacaggcgtaagattaagttgtgcgagtaaagcctgcgcaaaacgacaaaaagaacaaaatgagaataatgatgaatcataatcaaaccacagcaaatttcgacacaattataaaagccctgaataaccacgaagttatcgcatatccgacagaggctgtttttggcctgggttgtgatccggacagtgagcaggccgtgatggcgctgctggatctgaaacagcgcccgtgggaaaaaggactgattctgatcgcagataactatgatcaggtaaaaccttatattgatgattcacggctgacagatgaacagcgtgaagcaatgtttgcctcctggccgggcccggtgacctgggtgatcccggcaaaaccaaccacaccaaaatggctgaccggccgctttgactcgctggctgtccgcgtgacagatcatccggtggtcaaagcattatgtcaggcgtacggtaaaccggtggtctccaccagtgcgaatctgagcggactggaaccgtgccggacaactgatgaagtaaatgcacagtttaacgggcggatcccggtggttgacgggctggtcggcgggcgggaaaatccgcccgagatccgtgatgcactgacagggcagttataccgccagggctgacagaacaccagaaggatccggaatgaaaaaatttgctgtttttggccatccgattgcacacagtcagtcaccttttattcatcaggaatttgccgggcagtttggtattgagctgagttatgaacggatcctctctccgctcgacggcttccgcaacagtgtttctgcattttttgccgcgggcgggctgggggcgaatgtcacactgccttttaaagagcaggcgcatgcgctggcggatgagctgagtgaacgggcacaggtctgcggcgcggtaaacaccctgtatctgacagaagataaacggctggcaggggataataccgacggtgaagggctggtaattgatttgcagcggctgatgtttatccgccccggcgacagtattctgctgattggtgcaggtggcgcagcccgcggcgcattgctgtctctgttgcaggcaggttgcgctgttaccgttaccaaccggacattcagcaaagcgcagtctctggctgagcggtttgccggtcacggaaaagtcagtgcaatgccggtcagtgaaaccggaatgaccggattttcactgattattaatgccacatcatccggggtggacggcgcggttccgcaaatccctcagtcattactgaatccgtctgttgcctgttacgatatgttttaccgtacggggctgacaccttttctgcaacttgccgcagataacggtgtgacccggtatgctgacgggctgggtatgctggctggtcaggcggcttttgcattcaggttatggcatggcgtattgccggatattggaccggtactgacaaaactcaagcagaagatgacatcatgaaccagtccattcagtttccggaccgcgaatcacgggatgatgatcgggagtgcattgtctttccggtgatgattaacggctttttatcggattgccgcgtctctgcacaatacctgcaatcccgttacggaacggctcccggggaggatatgctggttctcttccgccggaaccgctgggatctggaggaagagtttgcggaattcattgaaaaaggtgaggcggatgagccgccttaccggttgccctgtgacagataatcatttttccacataacatagttattggctgaatatttcagcccttcatattcttccggtttcagcggacgggcggctttggcggggctgccgagatacaggtagccgctttccagacgtttgccgggagagaccagactgcccgcgccgataatcacatcatcctctaccaccactccgtccagcagaatggaacccataccgaccaggacacggttaccgatagtgcagccgtgcagcatcactttatggccgacggtaacatcctcaccgataatcagcgggtgaccggccgggttatccgctgtctggtgagtgacatgtaatacggagccgtcctgaatattggtacgctgaccaatctgaatgtaattgacatctccccgggcaacaaccagcggccagataccgacatcatcagccagacgcacatcaccgataatgacggaggagtcatcgatcatgacatttttgccgacagacggggttaatgtcagataggggcggagtttattcacaataattacctcagaatataaatgtattttggtgatcttaatgagagagtttaccggaggcaatgcaactttcgggcataattgccggaaaatacgacatgatgctcaaaagacagacagttaataagaaaattcaaaaaaaaggttgtgcaaaacgaaaagctccctataatgcgccaccactgacac

SEQ ID NO: 113 - DNA, 1258 bp, unknown
  Altogen 322075 strain
accactttcattttcatcggcccagttcatgggtgatcactttaccttcttccttgaaaacgggtaaattacaggtaaagttcgtaacttcattttcacaaaattcctcaactgtttcatcctgatccataaatgcgcggtgaacaataatattatattcattcagcgtaggatcacggtaaatcagattattaatgctataaaattataattatcgtaatcggtattacaaagtataccaaatttaaatagtcgttccatttagctccggacagcacatgtattcagattaacagaccctggctgatgttgctgtcagttggacgtgttgttactgccggattaccggtttaaatgataaatctgagtatcccgcttcggcgcagaaggtaaagttgtactgaaagtggctatacgtcatattttacgaaatggtactcagtcattttttcagagtatttttttactatcagaaataacagatttatcccctgaaaacgtgtgttactttatgagataatctgggtgttatccgtaactaattgaatttatctaagtataagtactatggttttttgtcaagaataatagcaggatgatcatatggttaaggtatattggcgttttgtcgataaagttgtctatattaatctggcaaaaagaaccgatcgccgggaaagtatcgagtttcagttaaagaaagtaggtgtgccgccagaaaagattattcgttttgaagctattgaaaatgaaaatggtacattaggatgtacactttcacatattagtgtcatggaaatggctgaaaaaaacaactgggaaaatgttcttgttctggaagatgacatgattttcaatgatgatgatgattctctggatagaattaattattttttcagtagtctaatgtccactacatgggatgcaggtttattatcaggaggctactattctctcaaactgcttcatggctgtttttatcagctatatttttcatttctatctaatagctacattgtcaatcagcactattataaagtgttgaaaaatattttttcttcctcaaaagaatcattagtgaatggagttgacagaaaatattgtagcttagactattgctggatccaattaatgaagaaagataactggtatgcaatttatccgtgtgtcgggtatcagaaaacggatatgagtgatattgaaaataaagagacaaacagggaacatctttttttccgtaaacttgatgaaatgaaaa

SEQ ID NO: 114 - DNA, 17264 bp, unknown
  Altogen 322075 strain
tctggattcaatggatctggaacgcgagcgcggcattaccatcaaagcacagagtgtgacactggattacactgcgcagaatggcgaaacgtaccagctcaactttatcgataccccgggacacgttgacttctcctatgaagtttcccgttcactggctgcctgtgaaggggcgctgctggtggttgatgcggggcagggggttgaggcgcagacgctggcaaactgctacacagcgatggaaatgaacctggaagttgtcccggttctgaacaaaattgacctgcctgctgccgacccggagcgggtggcggaagagattgaagacatcgtcgggattgaggcggcagatgctgtgcgctgctcggcgaaaaccggcgtgggtgtgaccgatgtgatcgaacgcctggtgcgtgatatcccgccgccggaaggtgacccagatgcaccgttacaggcactgattattgactcctggtttgataactatttaggggttgtgtctctgattcggattaaaaacggcacactgcgcaaaggcgacaaaatcaaagtgatgagcaccggccaggtgtataacgccgatcgcctcgggatcttcacaccaaaacaggtcgataaagagatcctcagatgcggtgaagccggctgggtggtctgtgcaattaaagacattctcggggcaccggtcggcgatacgttaaccggcgcacgcgcaccggcggataaaccgctgccgggctttaaaaaagtcaaacctcaggtctatgcgggtctgttcccggtcagctctgatgactatgaagctttccgtgatgcacttggtaaactgagcctcaacgatgcttccctgttctatgagccggaaagctctaccgcactgggcttcggtttccgctgcggcttcctgggtcttctgcatatggagattatccaggagcgtctggagcgtgaatatgacctcgatctgatcaccaccgcgccgaccgttgtttatgaagtggaaaccaccagcggtgaaatcgtgtatgtcgacagcccgtccaaattgccgccgctcaacaatattgaagagctgcgcgagccgatcgcggaatgtcatatgctgctgccgcagcagtacctcggtaacgtgattaccctgtgtattgagaagcgcggcgtgcagaccaacatggtgtatcacggcaatcaggttgcactgacctatgaaattccgatggcggaagtggtactcgatttcttcgaccgcctgaaatccacctcacgcggctatgcatcactggattataacttcaaacgtttccaggcgtctgacatggtgcgtgttgatatccttatcaacagtgagcgggttgatgcactggcactgattacgcaccgcgataattctatgtaccgcggccgtgagctggtggagaagatgaaagatctgatcccgcgtcagcagtttgatatcgcgatccaggctgccatcggtatgcatattattgcgcgttcaacagtgaaacagctgcgtaaaaacgtcctggcgaaatgctacggcggtgacgtcagccgtaagaaaaaactgttgcagaaacagaaagacggtaagaaacgcatgaagcaggtcggtaacgttgagttaccgcaggaagcgtttttagccattctccatgtcggcaaagattaatcattcagcaggttgtaaggagacataatggcgaacacctttgcgctgatcctgaccctggcaacgttggttaccgggatcatctgggcggtgaataaatttaaaattcagcctgcccgtaagaaaaaactggcgcgcatggcggagctgactgaaggaaccatggatcagacgcatctggctgagactgtggccaaaccgggctgggtggaaggtaccgcatccctgttcccggtgctggcgattgtcctgatcgtgcgctcatttatttatgagccgttccagatcccgtccgggtccatgatgccgacgctgttaatcggcgactttatgctggtggaaaaatacgcgtacggattaaaagacccgatcacgcagaccaccctgattaaaaccggggagccgaagcgcggtgatattgtcgtgtttaaatatccggaagatccgcgtgtcgattatgtcaaacgtgtgattggcctgccgggcgataaagtcgtttatgacccgtatgccaaagagttacaggtctatccgggctgtaccaaagaccagagcagttgtgaaaccctgccggtcacctatggtcaggagtatgaaagcgaatgggctatccgctgggaaaaatccccgctgggcggctcctttatgagcggcggcgcacgtcagttcccgatcgaagatgatatggaagtcggttatcgtcgtcaggcggaacggattgaaaacctggggccggttgctcaccatattctgaccgttccggaaatcaccccggacagcatcagcgggcagcgcctgttccgtcagccgggattaccggagtacacctgggtggtgccggaagggcattactttatgatgggtgataaccgtgataacagtgcggacagccgtgtctggggatttgtgcctgagcaaaacctggtcggccgtgcaagctttatctggttaagccttgaaaaacaggaaggtgaatggcctaccggtctgcgcctgagccgtttcggacggatagaatagaaaaaacagaatttgctgagcattacctgtaatcacagtgtagaatatgccccgcaaaatgattggctccccggtatacggggagccagtgcaaacgcaacagttttgtatcgcggcttttcgcggctacaggtctgttgcgtgtgcgttttataaacatcctaatttttggtcgcacatgaacccgatagtgataaaccagctgcagcgaaaactcggctatacttttacccgtcaggacttattaatgcaggcactcactcaccgcagtgccagcagcaaacataacgaacgcctggaatttctcggcgattctattttaagttttgttattgccaatgatttatatcaccgcttcccgaaagtggatgaaggggatatgagccggatgcgtgccacactggtgcgcggaaataccctggcggaactggcccgcgaatttaacctcggcgaatgtctgcgcctggggcccggggaactgaaaagcggcggcagccgccgtgaatcgatcctcgcggataccgtcgaagccctgattggcgggatttttctcgacagtgatattcagacaattgagcggattatcctcagctggtatgaatccagactgaacgaaatctcgcccggggataaacaaaaagacccgaaaacccggttacaggaataccttcaggggcggcatctgcctctgccgaactacctggttgttcaggtaaaaggtgaagctcacgatcaggagttcaccattcactgccaaatcagcggtgttgaacagccggtaaaaggaaccggttccagccgccggaaagccgaacaggccgcggcggaacaagcattaattttgttggagcttgaatgagcgaagaaaacacctattgcggctttgtcgcgatagtcggacgtcccaatgtgggcaaatccaccttactgaaccagttactggggcagaaagtctctattacctcgcggaaaccgcagaccacgcggcaccgcattatggggatcgatacacaggataattaccagattatctatgtggacaccccggggctgcatattgaggaaaaacgggcgatcaaccgcctgatgaaccgtgcggccagcagctccatcggtgatgttgagctggtgattttcatggttgaaggcaccaactggacgccggatgatgagatggtactgaataaagtccgctctctgcgctgcccggttctgcttgccatcaacaaagtcgacaacgtggaagataaaaccaaactgctgccgcatattgcgttcctcagccagcagatggatttcctcgacgtggtgccgctcagtgccgagaagaaaatgaacgtcgataccattgcgaacattgtgcgtcagcacattccgcaggcgccgttccacttcccggaagattacatcactgaccgttcgcagcgttttatggcctctgaaatcatccgtgaaaaactgatgcgtttcctcggcgatgaactgccgtactcggtgactgtggaaatcgaacagtttgttgtgcaggacaacggcgtatttcagatcaacggtctgatcctcgtcgaacgcgaaggccagaaaaaaatggttatcggcaacaaaggcagccgtatcaaaactatcgggactgaatcccgtattgatatggaacgcctgtttgatgcccgtgttcacctcgaactgtgggtgaaagtcaaagccggctgggcagatgatgaacgtgctctgcgcagcctgggttatgttgacgacctgaagtaacgcaccaatggacggctggcagcgcgcatttgtactccatagtcgcccttacagtgaaaccagcctgatgctggatgttttcactgaacaggaagggcggcagcgcctgctggcgaaaggggcgcgccgccgccgttccggtctcaaaggggcattacagccctttacgccgcttctgatccgctggggcgggcgcggggaactgaaaaccctgcgtgatgcggatcctatctccctggcattacctctgagcggtaccgttctttacagcggcctgtatatcaatgagctgctctcccgtgtgctggcgaacggcgtcacctattccgctctgttttttgattatctgcgctgccttcagtatctcgcggccagcgacaccacaccggaacaggcattgcgtcagtttgagctggcactgctgcaccatatcggctatggcgtggactttcttcactgtgcgggcagcggtcaggaagtctctgataccatgacgtaccgctaccgcgaggaaaaaggttttatcgccagcctggtggtggataacagcagtttcaccggccgtgaactgaaagcccttgccgcccgggaattcccggatgcggaaactttacgtgccgccaaacgcttcacccgcatcgctttaaaaccctatctcggcggaaagccattgaaaagccgtgaattatttcgtcaatttgtgcgcccgccgttggtttcaaaagaaaatggccgtggtggttcctcttcgtctgaaaaaggttaaactgaataacaaaagttacccggaggatgataaaaaatgagtgaagttttattgggtgtaaacattgaccacattgcgactgtccgtaatgcacgcggcaccaactatccggacccggttcaggcggcatttgtcgcagagcaggcgggagcggaaggtatcactgtgcatctccgcgaagcccgccgccatatcaccgatcgtgatgtggaactgctgagacaaaccattcagacccgaatgaatctggaaatggcggtcaccgacgaaatggtcgatatcgcctgccgtatcagaccggcattctgctgcctggtaccggaaaagcgtcaggaagtcactacggaaggcggtctggatgtcgccggtcagaaagaaaaaatcgcccgtgcggtgaaacgtctgactgaagccggaattaaagtttccctgtttatcgaccctgaccatacccagattgatgctgcggacgatgtcggcgcgccgtttattgagatccacaccggtgcttatgcggacgcggaaacgtctcaggaagaagacaaagaatttatccgtatcaaagatgcggttgcctatgcggctggtaagggcctgaaagtgaatgccggacacggtcttaactatcacaacgtccagcgtgttgcggcactgccggcgatttatgagctgaatatcggccatgcgattatcggccgtgcggtcttcagcggactggctgctgctgttgcggatatgaaaaccctgctgcgggaagcccgtcgttaatggcaattgtcggcatcggaacagatattgttgaaataagtcgtattgaagcggttatcggacgttccggcgaccgcttcgcgaaacggatcctcagtgacgcggaatgggacgtgtaccggcagcataaacagccggtgcgctttctggccaaacggtttgcggttaaagaagcggcgtccaaagcgctgggcaccgggatccgccaggggctggcgtttaaccagtttgaagtcagtaatgactcactaggcaaacctaacctgacctttctcggttatgccggagaactggctgccgcccgtgaagtcacacactaccatgtctctattgccgacgagcgtcattacgcttgtgctacggttattctcgaaacaaacacctgacagatgcgccctttgcgggcgcatcattgcgcttaaatcttatcggcgtgatacatcagcacaaatttatcccacagcatttcctgtgtttcggtatgctcaggatcgataataatggtgttggtaatcggacagactgactggcaggtcggtttatcataatgcccgacacactcagtacataaatcaggattaatttcatagatagaatcccccattgaaatcgcttcattagggcactcgggttcgcacatatcgcagtttatgcaacgttcggtaatcagtaacgccatagtcgctatcaccatataaattatttaaaattcagtaacttatatcttgcacttatacgttactctctgccgcttccggcagtgttcccggaactgattatagcggcttttatcggttggtaacacccagtaaggctgttacttatactagcgtaggtaaaaattaacattcatgatgatttttcaaggtgatactagcaaaataagatatgcaatactacatggttttatcttttcataatatttttttatatattaattattatatagatttgtatatagtgttttaatattcattgaaattaatctttttagcttcagctactattagtaatcaggttagaaataattgatgtcatatagtgaattttaaattatactaagttataatggtgtaagtaaaaatagggtagatatatgaaaattaaaccaatagttacgtcacttaaaattaaaaaattgtttggtaggtatgatttttatagcgattttaatgaattaacagttattgtcggaaaaaatggtcttgggaaaacgacaattttaaagattatttttgaattaataacagggaaggtaaaattagattatccgggtatatgtgaaagtattgagttggagcttggtaatggtgaatttatttgttatggtgccattaatgataaggcgattaagtcaatatctaaaagatcgataacagaggcagcacattatagcgataatattattcgctcaataaataaaatattagacgagaatgatttaactaatattaaagataaagataatctcgttgatctttttatttcctctatagtgaataaagaagggtttattgaaaaagcacaggagtatgtagttaaaggtctgagcgagaataaggattcattctttgttaatagactaaaaagagataaattaaatcaaagtataaatgttaggtatatatccacggttagtatttcagctaactcagtaaataatttagatatagggaatagcgttaataaaaatattttagacttggctattaatgaagaacttcaatttttacaaaagaagggtgacataaaattaatagaggggtttaaaaagcaaattaatattttcttgaaggagtcaggaaaaaaggtagagttcactgaggaacaatggatatttaaagtcgaaaatggtgaacctcttacgatagagcatctttcttctggagagagacaacttatttatattcttgcgacaacagcaaatacatgtgggaaaccaacattatttttgatggatgaaccagaggtttctttacatttaagttggcaggagaaaattattgatgcaatcatgaatattaatccagagatgcaaataattgctgtaactcatagcccaggtattgtcatgaatggtcacatggatgtgtatattgaaatgaatgagctattgaaaggtatttaaaatgtctgaaatgtctgaaattatgagaagtaaaaattatattcatatatacacgagtatggaatcttgtggcttacagaaaggtattatatatgtagaagatgcatcggacagacttttctggaagttagtgattgatacagtttgtcctgaacgttatgatattaaagtattttctcaaaaaggttcatgtggcaagcgacgacttgagcaggaatataaccatttgcataaagattttttagtagcggttgatgcagactatgattatatttgtccgaatagaaatgagtattctgctatattaaatagtaatccattcgtgttgcatacattttgttactcccgcgagagttatctccatacagaagatgcgattatttactttataaattccattcattttaatgttaatactgagaactgcattatccaagcccttaatatttactcgggaattatatttgatgcgttgtgtgtttttacattgttgcataacagagatcctcaggagcaccaagagaatatatttaacaagagtataaggctgcaggaaaataaaaggctacttaatgctgatctcagcattaatgatgaggcaattagtgatctaaaaagttcagtaagtaattacattagtcattgcgaacaatttatttatagttccgatgatataataaggcatcgtgatatattaaatgattacggtattactgaaaataatgcactgctttttataaatgggcacgacctatttgatggggtatttattcccatttatgacatgtatatcaaactaagtagaaaaaatgaaatggcttgggtttctgacaacttttcggagccggaagtcagagatagaaagaggcaagtcgataatcattataaagataattgtaaaccttccactttaatgtatcactgtagggaatatagaaactcgccattttggagaaagataacagataaacttaatgatttaatgtaaatttacattactaagtaatagctaataagataagaccttatatctgatattttaaaatcaagatactatatgttttcatatttttattattacttttagcattactatgaataattattcatagtagctttggaagtccagtaagctggttctggtatgataaggcgaagcagttggtacagttcagaatataatgctgataggtgtgtaccatcagtcaatatttgtggtgtcagtcgcacagactctcaggcgatgtccgtcgggatcggttgccacgaaagtgtagccgaaatccagcattgcgggtttcataataatcttcacatccagttcactccatttgcggaaaatctcatcaacctcccggttactgatatctgacatgcatatttctgtgccgccaatgtgtggttgtggtgcagggtcgatgccggactttgcctgaagccctaagatcatatcgtccgataaggcaaaaacagaaaattcactgtattgttcaacaggctccgtattaagtagtctggtgtaaaaacgggtacttttctcaacgtcgctgacatacaaaataatgctgtttggtttaaacatgctgcctcctgtagtttttcatatcataacgctgttgaatgacagaaattgtcagcagtgacaaatccgaaatagtgatgccggggttacctgtgtatttttataaaagaataataatgatctgatgtgactgataactcattattttgatgttatttatttttctgaaataaaaagccgaagtattgctgtggctttattatttattgtcggaagtgtaatatttgcaggataaaatatatcgtaacgatgcaatagattaatttgcacaattatggcaggagtttctgacgtaatttatatcggtatgaatcaacagacagggatttcctgtatattcttcactcaaagtaacaggtatgcaatgaaaaatatcaacacattgaagtcaatcacaaaccagggaaccggtaaatttgtattgctcagcatgttaactgcgggtatttatccgataatgtgggcctggaaaaatactgatgcctttaattcagagttgaaaataaaaccatttgaaagttcagtgttcatttatctggcgattgcaatgggggtgtctttatacctggatgtattcagctttatgagtgatgcctataattacgggtatatcgctgaatcaaacaatatctttgatatattgggtactatcatcacaattgcgatggctgttttctggattgtctgggcatttaagatgaagagtgctttagaatattatgcagcaaaagaattcggcatttctctgcgtcttaacggattctggacatttttatttcaatacttctatatcaactactgcatgaatgcgctggaagaagattttgccaaggaaaaaatgctggcagatgtccggagtaactactcaaataacagtacggatgatgatgaaaataaaaattaatttactgttacctctgtgcctgcttctttcagcgccggcactggcggttgactgtaatgacacagaggtcagaagagagctcatcagcctgtataatgatgtcctggatgttaatgatgccggggtaaaggtattggatgcctataaccaggttactgaaaaatctgatggtaacggatatcagtgtgttggtttatatgatttcagtgacggcgataccttaaaggtcaggtataaagagtatacaaacagcctgggtgatccgctttattcttttgaaccggttgacgaataaatactctgttaattcctttctctgaaaacgggccgttaatctgtgatagcggcccgtttatttcagttacttccctcagatgcatatatttaaatcagtgatttatacccgttcagtaaataaggcgccaaatgccagaccgtatcattaccggtaaattgcacattcattttcagcatcatattttctgacaggcagaacgggaagaaatgatataagtgcatgacaaacataaaggcatcgccggtattgtcatatttatgcggatccagtgtcattgtcagatccagacagcggtaaggttttccccggacaagacggtcatccagtactgaatcaaccgcgtgaataccactcagcagctggtttatctgtttgcagcgctgccggtctgtgtcctgatacagcacatagtcactgatcagctgttttaccgaatctactgacgacagcataaaactgttggcactgtagtgtgacagcagattccagtaagcgtgattatccgttatcggcgggtagcacggcgtgcattgtgtgataccggtggcttccagcagatccggcagcagcgggctgagatggcagatatcctccgcacggctttgcggtgcactgataatacagcggtaagtacagcggaaatgcgggcccggcggaacggtcagtgctttgccgtgattatcataaaaatggatataataatgattctggccggtgatggttttatcgatgctgagcgcgtaaaaccaggcatcctgatattgcggcagcaggcgggaagccggtgccaggtgtgttaccggatagaaatccgcgacaacgccgcggaattcctcgtgaggctcaaaagccagctgaatatgctccagttccgtaatgtagtgagcatcatccagcggcaggcggtaaaccgcttcattttcatgaaaatccaggataatttctttttgttcttcctgattcaccacggcggcacaattaagcagaaaactgtttgtcagttgatcattacgcagcggcagctgtttgctgaaataaatattcagtgtgaaggtgtctgataatgcccagtcaagttccggaacaatcgccggaacatcaatattgataaaatggtgcacatgatcgatatataacccttccagcagtttttgcggccagttcggtttttcatctgctccttctaataccgaattattttttcctatctgaggaataaagctgaaccgggtttcatcaccgtgatacagcatatcgccgtgagccagttcgatatgatcaaaatactgactcagccacaataataaaataccggcggaagagacggcgggatcaagaaaacaggaaagttgtgcggtttccggttctttatagttaccgcggtatttaaattccagtgacaggcagctttttgacgggtggtgcgtcacatagcggcgtaataacgtgtaaggctgtaacagcgccggattacaggtagtgaagatttcctccgccgcgccttttaccacggtacctgcggggatagccagcgggaaatcaatctgctcctgatcatcgaaacggacaaccgccgtggccggaatgccttttatcgcacgggactgcaggcgctgtaacagcggcagggtaatttcaggaaatgcatcatccactttttcctgcaaccgggcgctgagaaaggcaaatccttccagcaggctgccgctctgttcatcatgcgggtcgagaacatcagcaaggtgcgggtaatcgcggataaactcgcggctgagttgctgtaaataatgctgttcctgtaaaaatttaatttcgctcatgagtgactctgcggctgccggtaatcagtatttattgtacggagaattaacgtgtgctctcttcccagcagcaatagccggatgttcctgccataacatgctggaaaataatatctttgtatttcacactgatggtttcttccggctgtgcgtcattattatccgcagagtgcggataattgctgttaatgctgacaatggatgcctggcgcaatgtgacagtgaagtatttttcctgagagccgttctgagatgtccggtaaaagctgaacaccatctccatcacttcattattggcaatcgcattcgccagtaacggcgtggatttatccagcagtttgacaaaattcaccgggctgaatgccaggttctgggcacggttaaacatattattcagatggagtacaaatatttcattctcatggcccagctgatatttattgccgatggaatcaagactgcagcaaccctgtgaaatagtgccctgctggttgccgttaacacttaaatagatcatgttcgccataatgttttccttattcctgtttgccgctgccgggtttcagacctgcctgttccgcctgtttctgtaagtccgcatagagtgcggtcaggccgttaagctgttgatcaatccggtgcagttgtgcggctgataccggtttaccgttgcggatatcgtcagacaacgcgcgcagatattcttctgccgggacggtttttgagtgagccagctgaatgttgtagatttcagttttcagataggacagggtaaagctgccgcgatctttttctctcgcgacaatggtgtcggacagtgcctgcaaccgttcattggtgaggtaccagctgtccgtttgtgccacatcggcaatccgggtctgcaatacatcctgccagtggcgggtggcataggcctgatccggatcattcggccagcgctggcgggcaatgtcagtcattttctctgtcagcagcagcggggcgataggggactgctgttccgcatcggccagaaactgcccgtaggtagccagttgcgggttggcaaaccacagcaccggcgcactgccgggttgtgcggcgaaggtatccagttcatctttcaccggtttatagaccgtgaagaacaacacggcggtgataatcagcccggtgatcagaccggccgtaaacccggcaaacgggaatgttttgcgcgctgccggcggtgtttctgccgcgacctgcacaagacggacggtgctgtgacctgtgcctccggcagaaaccgcatcggttccggaaacgggcgggctttcttccgcgatatagaccagcggggcgacagtgactgccggcagttcatgacccgccgccggagacggctgttcaatctctttggcggcattacggaagtaaaattgcaggttgtccgtgaccggcgttttgccggacggtgtctgtgtcagccgttcggtgatcagctgtaacgcccgctctgcccggtagagcaggcgcaggtcgtcacggctgaaggtgagacgccgcactgcggccattgcccgcgtgataaaccagttaagaatatcaatacggtgattgatttgcggcggccacaccgcatcccagtcatgaaccaccatcatggcaatcagttcactgccttccgtcagcccggccaggccgttgcggtgcaggcgggcgagggtgtagtagactgccgtctgcaaatccacgccgtttttcctgaacagagccagggattttgcttccacccgcgaccagctgacttccggctgtgacgggtggctgagtttgttgatctcttccctgatttccgcaaactccggtaaatccagcggagaagcgcctgtccggataataatgccgtccatattcagccccgtcattaatacagtgtttcaggcaggctgaaacgggagaacagattgccggagaacggattatccgactcatcaatatagatgcggtaagtcatttccccgtcatccaccgcaaagcggacatcgaaactgttggtgttcacgttggtcagttttccggactgaatcagccggatctgtgcccacgggccgttacggacaattgcacgcggtgatttgccggtggtgccggaaaccagcgtcagcttgctttccccgccggagcgcatggagttcggccagatcatatgagcggtattactgcgtccgtgtgcatagtcgaggatctgcccgtcgaggttcagcacgctgcgccgtttgctgccggataactgtaccggctcaatggcaaactgggcttcgaggttgccctgcggcgtaaagaaggtgttgcggatgcggttggcggtttcaatctgctccagcacatccggacggatcagcgactgaccatcctcattgaccagcaggttgttttcagcaaacggccgcagattctgctgccagaaggcatccagcgttccgcccggtttgaagaagcgttcaaactcactcagcggcacatcacggtttgatttcggatcaaacggataacggcctgcgatatagctgttgtactgtttgaccactgattcattccattccacttcgagatagcggatagcctctttctgcaccacaatccacgcctgatcggccagctcaccaatccagcggcccagcggttccggcatggttttcgccatctggctgacttcaaaaatggcatcgcggttattttcttccagccgcaggaaaacggctttcagagcggctttgcccggcaccggcgcattttcgatactgagcaggtaacggtgcagttcattcagtttctggttgacgttttgcaggttctcgccgttattactgaccagaatttctgtctgtggtgagaattcccggttgatgcggctgagtaaccggtactgactctgtgccataaaggcttgtttttctttctccgtcagattgctgtccacggccggcaggctggtgttatcccgcagaatctgcagggcacggcgtaacggctgctcaccgctgatgatctgctccagcgcattgatttcatcctgaatagtttcaaactcacggatttccaggttactcatggctgcccgccagttcgcggcataatcaccgagatactgttcgctgatctggtgctgaatttcctggcggtcgctttcactgtaacggacgttttgtgacaggttcagtacccaggcatccagagcggtcagatccaccagctcctcattctgccggataaagtaattgagcagcccgttgcgggtcaggaactgcggcacttccagtttttcatcatccagtgagacgaaaacgtggctgaaactcggcccgatcatatggcgcagatccagcggcgatgacagctcattaaagcctttcaggcgcagtgtctggtacacccgctgatagagtgagagctggctcagctctttctgggcgtcgcggataaccggagcgaacggcttaaaggcctgattagcgaccatttccccgcgattgcggtctgctgcccagtcagtatgttcgagggcataatcgaggtgtgccatcagttgtgactgaatttcgttttgcccggtaaattcacggctccagcgtttgcgcaggtaatttttgacaatcgcatcattacggccgcttttgtcttccagcatgcgcatgacacgcagaatagcgagtttttcctcactgttttccggtgcctgtgccagatcctgctgcaatccggccataatggccggcagaaaacgttcgatcagtaactggagatagcttttttccacatacgggccgatttttttgccctgatagagaccgaggtcggtcagaaggccgtttttctcgcggtagttaccgtaagccagtgtcgcttccgacagcgggttgaggatcggcaactggcggacgccggtggtgtcctgctggttatccgccgtcacactgctgaatgcactgacttcggaaagcacgtttttaccggcctggtagttctggtcgtagtaatggtgccagccggtccagagggcgatgatccccgccgctgtggcaaccgaggcaaaaaagactttgtggtgatgacggcgcagccagaaacggttttccgccgccaggttcggctctgaaaataacacatcgcggaccagctgaccggtaaaccaggtctggttttcgctgaccggccaggtatgtgttggtgcgggcggcaggttgtactgcacggcggcactctgggtgaaaatatcgtcgatctggccgcgctgggcagaggatgtcagatagataccgcggatcagcgggatgtcgtcatcattgctgccgatgagctgttctgtcagctcggtcactttattctgcagcccgaccatctggcggataaagctgaacagttcactgcgctggctgtcatccacccggttcagcatcatttccggcagcgcggcattgagctgacggatccatttttcccagaaagtggtgagttcactgacccagctgtgctggttgtcgcgggtgaaggtcacgccgagaacggattcct

SEQ ID NO: 115 - DNA, 28112 bp, unknown
  Altogen 322075 strain
tgggtggcttttttgcgtttgggggtaaaataaaaatggcgaaatatgtggtcatttaccggatgaaaaattaacagtcggtaatttcaggtttaactacaggtaatactctgcacctgaatagatcataatgagtcaatggtgagaaatcacaccttatatatatcgctgtcattctcctgaaatgttccgaatccctctgaatgcaatctaaattctctcctttccggacacgagctgcgtgctttttttaagctataagacaggctgattttgcttctttagggcattgtgcgacaaaaatgaaatattaaaaaagccaccgcgtgcctgatgcagactttctgaacaattccgggtaaccgggaaactcagaacgcattatcctgtggtcacactttgccggggtcggggctcatcgctgcagttgcaaataccggaaaaacgatcctgacaagtcggatggctgatgggctatattacgcagtcaggtacaggaactgcataacatcagtcatggaaagagacttcagatgaaattgatcgggtgacagacatcaccttacgcgtcagtccgcagtaacactacccgatcagatatggtgacgtgacgtatatccggacaactgactgcccatcaaagagccgtaaatattaccggaatctttcgtactggcaacagaaggtggcagaacagtaaggttaatcattcaggagcgggtgaaagaactatagaaaagggtttcatgtttatcatgaaaccctttctgttccggccaccgggtcttcaaatggccggaattaactgtaacgcagatttttagcctctgatcattgatcagaagttataacggataccaacctgtccgttgattggtgaataaaccgcatcaccggcaatgtgctgtaattccatgaacatattcacgttgttatagcgggcattgaaaccggcaccgaatttaccggtactgccggataaatccaggttaatggtgttgtaacggttaaattcaacttcgttaccgtcttcatactgatgattccacgctgctttcacatacggggagaacaccaggccgctatcaaagctgaagtctttaccggcattgacacccaattcgctggtaaatgaagtctggctcttgattgctgcatccataccattattcagggtgatatctttactgcccatacggttatacgctaactgtccgtaaggtgtgataaagatctgattactgaaggtaaaggtataaccggtttccagcgccatcccccagacagaggtggagtaattgtcgctgctgacatcataaccgttagtggatgttgtcttcagtttattatcaaagtggttatatttcagtaatgcatccccataccagccgttgctgttcagataagtggcataggcaccgaaggtatagctgtcgatatcactggtacctgcccagtcatttttgacatcacctttatcaaatccggtgaaaccacccagaaccagtttgctgtcactgtttaacgctaactgataatccgcacccagctccagaccggcgtgtttgagtttgtactgaatctgatctttatccactttggtattgctgccgataccctgcatccagagaccgttctcaatactgtcgctggtacgcagcatatgcagacgtgcacgcagatgatcaacttcgttgttgtacatcagctgcggcgcgctggacagtgcgagtaccgcacgggcacttggtgtcaggcgatcggtcgcagtgaatgaccatgttgtgtcattatcggcaccggtgcgggtctgaatattatgaatgtaagtaccggcatccatcaggttgaggattttgccgtccgcatccttcataccaaagaccgcattgctgtcaccggccacgtttttcacatacgcgaaatcagcagactgaggacggttcagaacggcttctttaccggtgtcccgctcaatgatggtgacatagtgctgaccataagcattatcagtattgataaagtcagaattaccattgaggatattgctgttcatggtgaaatctaatgtggtgttatcatactgcgccggatcattgttacccagattattgatattcatctgagtatggcctgccggattggtccggtggtcaaaattaaccgctgctttaccgtttaaggtaccgatagtgacggcatcgtgttcctgagtgccttcataaacggtgacggagcttttgcctttggtctggctcagagcaagatcttccacatacgcgccattggtggtggcagcatacagatccagatggtttttgccgttaaaggtagttttgccggtcgctttaccattggcctcaacaatcatatcgatatcaccgttgagggtattatttttcgcttcaccgccattttcaacggttaagtgagaattgccggtcagggtgttatcggtggccaggccgccttttttaattacctgtttaacgttgttcagcacgttggtggttgctgtgccactgacaatctgcacgcccggtttttgggcatcggtattattaatggtgttgttaacggcagtaccgtcgacatactgatcaccatcggtgatgtcatttttaaccccagccatgccgcctttcttaacaatctgattggtattggtcagtttgttattgttggcggtgccgctgataacctgctcaccacgtttatcagctttattggtgatggtattgttttctgcaagaccatccacatactgactgccgttggtaatgtcatttttaataccggcagtaccgtttttgccgacaaactgatcggtttcggtcagtttgttattgttggcggtaccgttgacaacctgcttaccgcggttagtggctttgttagtgatggtattattttctgcaaaaccatccacaaactggttgccgtcggtaatgtcatttttaacggaggcgataccgtctttttcaacacgctggtcagtgttgctcagggtgttatcttccgctttaccgcgtacaacctggataccgtgctcagcaccggcattatcgataacgtttttaacggcaacgccggttttttcaatgatctgatcggcatttttcagtgtgttgtcagttgctgtgccgctgactaactgaaggccgtgtgtgccggtggtattatcgatactgtttgtggtggctttgccgctgacagtctgattaccgttggtgattttagtgttatccgcttcaccgctgacattctggtcactgttacggagggtgttatttttggcaacaccaccggaagagatatcctgattagcgtaatcaaaggtggagtcgatcgccaggccattactgccgacggtctgaccggtatgttttacaccggcagtaccggtaaaggttgcatcaagggatactgcttttttgccgtctttacctttgaggtgttgtgagctttgtccgttaaacgttgcaccttgtgacagtgaattctcaccgatatgctgttcagctttgccgttaaacgtatcaccggtggcaaccaggtattcacctttatctgcacctaaacgggcatcagtaacatcggtgcctttgatggttaatgttgcattgctgttgtctggttttttgacatcaccaatatgttcgccatctaaatattgtttggattcatcattgtaagtaccgttcccggtgctgacagtgatttcatcccggcggttattgtcataaccgttacgatacagcggcagtgttgactgagggtttgacgggttctcatagtctgcaccgcgatacttactataggcgtcactaccggtaatagtgacaactgatttaccaccgacggttaaattatccgctttaccgttgatacggacactggaatctgtaatcgccagggtgtcgacttctacagcggaataaaagtattcatagtcatagttgacaccgatccgggtaagagagccatcattttccgttctgtgggaataatacatatctccttcccgatcagactcacgaccgacaaatgtgatggtattcggactgttactgattgatccggaatatttaacagtatcgtcagaacgatatttccctgtgataaccggacctgcgttgttgttgtttatattaacggtgtcactgacagtagccgccactcccgcagatacggaaagcgcactaactaccaatacggtaatttgtgaaagtttaaatttcataatagtggcctgtgttcggaataaaggtaaaagggaaaagatcctaatacctattattatcagtcaattatagggtgtttactacgcgggaaataaggggattcctattgcaggtatctaatggcatgaatatattcttattttatttttgctatgggtatttgcacttagacatattattttcattcttactttcccggaggacgagttgtagtcattataaaaataataatgaaagtgccactttcatatcggtttattttacgtaatattaattttaagtcgtattatttaaaaacaaaataaaaagaaatatcgctatttaaatcgaaaggttattaattttttaaatttaccggggcactattattgccggaggattaagtgtaacaaattattttctgtatgtgatgctgttcacaaaattaacactgtccggtcaccggatttttatttcagcgattggtacacactgtaaccggcaacggcgccggcgatatcccagacgaaatctttccccccccagccggtaccgcccgggcggctgtcataaaactctttcgcggctcccagcgcaacagaaaaaccgataccgaattgtgcactgtgccggtgctgccagttctggtgatcgccataagcattagcgacaattgcggttgcggctgaaaaggcgaaatgctgggctttatcccgtccggtccagctgtcattagcaaggtgcatcgaacagccggaagtcagcaggcagaaagagactgtcagacgggtacataatgttacggacataattgttctccgggaaacagataaaaaaatcccggcgggtgccgggatgtttatatcagaggatccggcttatcaggcgatcaagacggacgcggcgcagacggcgcagcagttttttgatcttgaccggatagtcacggatattatccagctcagtgtagctgcggataatggttgtgttggtgcggatattggccagctcttcctgacgctgcgcgtgcagttcctgtttcgggtcacggataaggatcgcattttccagatccaggccccaggcgcgcgggttcaggttattaccggtgatcagctgccactgattatccacccacatccctttcaggtgataggtgttgtcgtcatccttccacagacggatggtcagttgctcactgtcagagaaacgctgcagacgctgcataaagcggcgcagattgatttcatacagataaggcagcccgccgataattttgaacggctcttccggcggaatatagaaatcattggcggttttatcgccgataatgatttccacctgtttcccatcccgcagcaggcggctgataatgcgtaccagtgttgacggcaggttgaaatacggcgtgcagataaccactttttcctgtgcggaacacatcaggtgctcaatagtgttattgagcatattctttttcccgaggccaatcagcggtgtcacggccagctgatcatcaggcagtgcctgcggggtgaagtggtatgcggcatggcgcagtttcaggcggaaatcgcggatcaggtttttgatttccggcgtttttacacgggtttcggtatcgagtttctgtaccgccggttccggcagcagcatttcatcaataaacagtttcattgccgccgccagttccgggttacgcaggaagtggtagcggtcgtaacggtatttatcatgctgatacagatagacattattgacgctggcaccgctgtaaataacggtatcgtcaataataaaacctttcagatgcagaacacccagcgcttcgcgggtatttaccggtacgccaaagatcgggataagcaggtcagggtgagatgccgcgacggagtgataccagtcggcattggtggcattcgcttctgcaccgatacgcccgcgctgtgcgcggtgccagtcaacaaagactttgatatccagttccggattggcttttttggcggcatacagtgcgtcaaggaaatcccggcccgcatcatcgtgttcaatatataacgcagaaatataaacggttttctttgcaccggcgatttctgccagcagacggcctttaaagtcacgggtatggaacagcgtttcaacatcatccgcagactgtgctaacttcggcagttgtgcaaggtgctgttggtgtttcgcggatttgaattttgacaacatcacagtgcgaattatctctttagttataggcggcggttacggaataaacaggtaccgggccggtaatgaaaagatgaacagatcaaaggattatatcaccagtttgtctgattgtgcgcagcaattcactttctgcttaagtgacggttaagtctgtgtcatatatcacgttgtccgtttttgactattgcactgccgcaatttcggaattcaggtgaagtgtcaggttgacgatgccatcctcaaactgtgtttcgacggtaaacccgagttttttcgccagttggatcatattgcggttctccggcatggtgatggcggtcagcaggaggataccgcgtgattttgtgtaggcgagcagtttgcacatcagctgataacccagagtattgcctttcatatctgaccgcaccagcactgcaaattccgcttcccggttatccggatccgacatcgcacgggcaaccccgataatctgaccgccgctgtccaccgccacaaaggccatttcgcggtcataatcaatctgggtcatttttgccaggtcgtcgtgggtaaattcactgatctcactgaaataacggtaataaagatcttctttggtcacacggtcaataaaggctttcagcagaggttcgtcttccggcaggataggtcggacatgcacaaccgcgccgtcttttaactgaaaattctcctccagttctgccggatacgggcggatagccagacgctgacggccgtcaccggccgccggtgccagagtcatggtggcatccaggacagtaaattccgtaccggaggcgagcagcgggtgcaaatcgagtgtcaccacctgcgggcagtcaattatcaggttggacacctgtaccagcacccggctcagacccgcaatatccagcggattcagggcactgccggctgccagtttgttattcttaattgcgtgaatgaccagataacgggcaagcgccatattgagcggcggcagggcaacggcggcaggggattcatcatcccacgggcggctggcatcccccagcataatcaccgggccgaaaaccgcatcctgggtcacggcaatccgcagttcctgtgctccggcacggttcgccatcgactgcacaatcagcccgtctatctgcgcatcgggaaagttttgtgtcacccggtcaataatcgctgccgctgaggtggcgacttcctgtttatcccgcagataaagcatcacgccctgaacatcggatttatgtgcgatatccggtgagcgcagtttcagtgccaccgggtaacccagtgttccggcaatggtaacggcatcatccgcagaatgggcaatccaggtcggcagaatgttcagcccgtaagcatccagcaccggctcaacctcataggtatccagcacggtatgctgacggcgcagggcgctgtcgatacagtgatgagcctgctgccggttggcggtcagtccttcggacagagcgggagtttccgccagctgtttctggttgcggcggaattccaccatatgcataaaagcggtcacagcaccttccggtgtgcggtaagtggggatccccgcctcgccgaacaggcggcgggcttcctgtgaggagtattccccgctccagttggtgaaaattgtcagccagcggctgcgcggatgctgcgcgatcgcggcaataatccgggcggcggtttctttgcccggtgcaatcgcactcggggagtggaggatcagcagggcatcatgatcgtggctgtcgagcagaatattcagggtggcgatatagcgatccaccgtggcatcatcgcgcagatccagcggattattgatcacaaaatcatccggcagcaccgccgcaagtgcggcgctgctctcatcgctgagaccggcaattttcccccggcggcggaacagttcatccagtgccatcgccgccggtgccgcgccgttgctcataatggcgagacgttcaccgcgcagcggcttcataaaggtcagggtttccacggcggaaaacatttcgtgggtatcctgcacccgcagcagaccggcacgctggattgccgcgtcataggcgatatccaggctcggcgtttcaccgaccagtaattgtgtgcgctgagtgcggccgcttttgaccaccaggatcggtttattgcgggaggcactgcgggcagcggacataaagcgccgcgcatcatgaatatgttcgagatagagcagaatggcactggttttgctgtcgcgggccaggaaatcgagcatatcgtcgatatcaatatccgcactgctgccgagtgcgataaagtaggaaaaaccggtttcccgctgttgtgcccagtccagaatagtgttggaaacggcggcggactgggaaataaacgccagtttgcctttgagcaccggtaccggggaaaaactggcattcagcccctgccagggcgcaagcagccccaggctgttcgggccgagcaggcggatattatagtgctgacaggtctgtttcagctcagcagtctgtgacgccggggcggagagaataatcaccgcgcggcagccgagttcaccgagttcattgagcagggcaatattacgtttgggatgggtgcagataatggccagatccggcaccagcggcagatccgcgacagacggatatgccagtaccccctgcactgagcggcgtgacggcgtgaccggcagaaccggtccggcaaaaccgccgctgagcagattgctcatcatccgggaacccgcccggttgggcttttcggatgcaccgataaccgcaatggattgaggccggagtaatgcttcaaggccgcgctgactcatggtgttctcctcagaccggattcccgtgtgctttaatttagcctaaaagcagctcctctgctctgatttgtgccaccggaagatgtgacttacccttcaaatactgacggcggaagcaggtgaagtgatccagaagctgttttccggcatcggtatcacccgccatcatcagtgccgcagcggccacttcggcggtacagtgctgatcttcccgcgccgcaacccgcagcagataatctttctgcgccagatcgttgatggagagcagcgggatgttatcgagatacgggcttttacggaacattttgcgtgcttccggccaggtgccgtcgagcagaataaacagcggcggctttgtattttccggcacatcactgaacacctgacgcggcggagtggcatacgcctgcgggaaaatcaggtacggctggcgggtgtcatctttcagcagcgtgagcagggcctcgtccggttcggtacgcgaccacagaaaagcctgtgtgtccggcaggacatcggcgataagcttcccggtattgctgggtttgagcggctctgtatcatacatcagcaggcagaactgactgcgcgcatcccgggtctgtatggtgtcacacagacagtttttttcgggtaataagcagtaattacaacggactacacggcatccccgggcacggaaaacacgggtggattgcgccagacgccgctggcgtaactggtaaacagaattggtcttcatttttatcggctggtttcacaaaaaacagtatgcattgtactgttaacgctgcacaatagcatgatttttcgcgggggcgcctgagttcagtgcctccggcgggggcggccggtgatcataaccggcaggtccggacgatatcgggtaatcttcgcccccggaaatggcgtgggagaaacacatgaacgactctttaaatggtaaaaacggcaaagtgaaagtaatgtatgtccgcagtgaggacaaacaggacgatcagaaaaaatcagacagacgcggcggccggggcccggatcgcggcgaccgcaacagccgcggcccgcgcggggatcgcaatgaacgcagcaatcgcggagaacgcagtgaccgtggtgatcgcggcgaacgcagaggtcagggaagttattccgatgacggtcgttcaccgtggaaaaccgtgtcccgtcagccgtcagaagacggagaggggctgatcccggatcatggtggtatcagcggcaaaagccagatcgacccggcacagctgcgccgtcagcgtcaggaagaaacccgtatttacggggaaaatgcctgtcaggccatgttccgcagccgtccggagcgcattgtgcgcgcctggtttgttcagtcagtgacaccgcgtttccgcgatgccctgaaatggctggcggcaaaccgcaaagcttatcatgtggtggatgaggaagagctggccaaagcatccggtaccgagcaccacggcggtgtctgcttcctgattaaaaaacgcggcggtgtgagcgcggaaacttatctggaaaccgccggtgagcaggattgcgtactggcgctggaaaacgtcggtaacccgcataacctcggcggtattatgcgcagctgtgctcacttcggtgtcaatggtgtgatccttcaggatgcgtctgtgctggaatccggtgcggctgtccgcacagcggaaggcggtgccgagcatctggtcggaattgatgccgatggtctgactgatacgctggatttattccgcaaaaaagggtacgccatcgtcaccacctccagccacaaaggcagcaccgatctggcgaaagccacactgcctgcaaaaatggtactggttctgggtgaagagagtgacggcctgagtgacgcggtctgggaaggcggggatatgcgcctgtccgtcggcggtaccggtaatgtggaaagcctgaacgtgtccgttgcgaccgggattatcctggcacgctggtggcagcagaataaagtcagctgataccggctgattgtgattaataaaacccggcaaatgccgggttttttaatttacttaatgtgcaccgccgccgccgccaccggcagtaaacggtggtttggcaaaccagaccagcagcatcagcaccaggaagacaccggcagagagccagaagatctcgttcgcagagataatcagcccctggtcggtgatcacttttgcgatataggccgatgattgctgctgcgacatccccatttcacccagcgtgtgatacatctgctgtgtatccgggctgaacgggttgatatgctcggcaaaattggcgtgatgcatggactcccgctgtgtccacatcgtggtggtgatcgatgttccgatagccccggccagtgtccgcgtaaagtttgacaggctggatgccgacgccattttctccggcggcaggccggaaagcgtaatggtggtcagcggcataaagaaacaggcgattgccagcccctgtacaaactgcggccaggctgcggcggcaaagtccattcccggctcaaatgtataagcccgccagtagaaacagacggtatacataatgaagctgaatgtcacaataatccggtaatccactttatgggcatatttaccgataagcggcgtgataagcagcggcagaataccgaccggcgcggaagccagccctgcccaggtggcggtgtagccgaataccccctgtaacagctgcggcagcagaacaatggtgccgaaatagagcatataggccagactgaggctgagacagcctatcgtgaagttgcggctcttaaacagagacaagtccaccacggggtggtcatccgtcagctcccagacgatcaggaaagcgatggccaccacggctatcacggtcaggacaataatctccgtcgagttaaaccagtccagctctttgccctggtcgagcataatctgcagacaaccaacccccaccaccagcaggatcagcccgacagtatcaatcggacggatttccgttttggtctcccggccctccagggtttttgcggtcagcatcatgatcacaatcccgaatggcacgttgatgaagaaaatccagccccagtgatagttgtcactgatatagccgccgaggataggcccgcagatcggcgcgataacaatggtgactgaccagagcgccagcgccatagtgcgttttgcgggaggatagttattgagcagcagactctgtgacagcgggatcagcggcccggccaccagaccctggatcacgcggaagaaaatcagcatgcccaggctgttggaaataccgcataaccaggaggagatggcaaacagcgctgttgaccacataaacagacgcacttcgccgatccgcttggccagccagccggtgatcgggatggagatggcattcgccaccccgaatgaggtaatcacccaggttccctgagagttagaagaacccaggttaccggcgatcgtcgggatcgccacgttggcgatagtggagtcgagcacctgcatgaaagtcgccagtgacagggcgatagtcatccaggccagtcttgctccggtcagtggcgcctgcataaccctgaccccttactgaccggcattgcggctgataatctcagcgatcatctgatccgccggttgcatatcaatgctcagggcactggtatgataggccggatcggtgcgcacgcttttcgacagcaccgggccgtcagtattctgtgtgtccacggtgacatcaccggaaagaccgatacgcagcgggtatttctccagctgtgccggatccagcgcgatacgcaccggcagacgctgcactactttgatccagttaccgctggcattctgcgcaggcagcagggagaaggcgctgccggtgcccatgtccagcccggtaacggtaccggtgaagaccactttgtcaccgtagaaatcagtaaccactttggccggctgcccgatacgcatggcgctcagctgggtttctttaaagttggcgtcaatccacataccggtggccggaaccacggccatcagcggggtggcaggggtgatttgtgcaccgacctgcacactgcgccgggagacataaccgtccaccgggctgcggatatcggtccgctccagtgccagccaggcgttacgtacttcagtggccgcctgtttcactgccggctgttcgctcagcggggtatcgaggatcacggctttgttggcattaaactgctcggtggcaacatccagctgtgctttggcgctcaccacggcttcgcgggcgtgctgaagttcttctttgccgatcacattttgtgcgcccagtacttcacgacggcgcaggtcattctgcaggcgggtcagttctgaacggcggacttcaataccggccagtaactgacggctgttgatcatctgctgatgtgtctggcggacactgtttgccagcgcaacctgtgctttttccagcgccagtccggcatcccgtttatcgagctgcaccagcagcgttccggcggtcacataatcggtattatccacactgacagtcgtgacactgccggatacctgtgacatcacaatcacctggttgccggtgacataggcgttatcggtcgattcatggtggcggagcaccataaaccagtaaacggtgtaagccgcacccagtaatacaaacagtaatgtcagtaacatcagcgcattacggcgttgtcgttttttgttacggacagggggctggacagcctgagtttcctcactgacactcatcagttatctccggatattgttctttttttaaggtgttgcatgacataaccgcaacaaagacaggcttgctattgtcgtcactgtgataaacgacaaccgcaagcccggatggtcagcacatcaattgatggcagaaatgtcagcctgtgaaggataaaggatccgggccaacagaaaaggtttttttacacctgcttattgagaaaagctcttattcattaaccttaaacaataaaaggttatttagttgtcgctcttatcgagctgaataagcagtttgcgcatcagcttttccaggcttttctgttcatcttcagccagtgctgaccagatatgacgtaatgcatcatgctgaggcggcagcagactgtgcagaaaatctgagcctttttctgtcaggtgcagatgcagacagcggcggtcattgtggctctctttgcgctcaatccagccgtttttctcgagttcatccgcaatgcgggtcgcattggtgcgggaagagccgagcgcggcgctgagttctgaaggctgaatgctgtgagattctttagtatccagaatcatcagagccatgaataacgtctcattgatgccctgagatttcagcatattgttgcgtttttctaataatttactctgaacgtgcattgaaagccgggtcagtaaaatttcctgatacggcagatcggcacccagattcttctgttgtgagatccggctgttaagcaattcttctgtcggtgtaaatgaactttccattattgagataccttattagtttctgttggtatgttaacccggctatgacccggtgaaatgaccggccaaaagattaatttaacaattatagcaggttaatatcactacatttcttttgataatgccacctgattcataaattttatgaatgttagtcacaaatatcacttattatttagcaaatcacttacattttcattaccgggcggctgactctgattatgcgtaatttttgcttcataaattacgtcaatttttattagtgaaccatgataatgaagaatatcaaatgaccttcattgccgttatggcagtgattatcgctgtggtatctattttacgtggtcaaaaattattttctttgattaacagtgttatttgtaacttttaacgaaggaataatccacaggtggtagattattatgcgatgtttgttggatttttgagtggaaaaagcaccctaaggtactttttccggaggaatcaggtgtgtgatggctgctgacgggtagatgtttcatcagactgcggtacatcatacttcttcccggcaagccagatcaccagtcccagagcactgactgccgcgccgctgtaacagacgccatcccagccatagtggctgtaggcatagccggacagcagtgagccgaatgcgccgccgcagaaatagcaggtcatataaccggcagtcagacggctgcgtgcctccggcatcatccggtagagggtactctgattggtgacatgcaccgcctgtaccgccagatccagtaccaccaccccggccacaaaggctgcgacagaatagccgctcagcgccagtgggatccacgagagcagcaagagcagcagaccggcgctggtggtcagacggcctttgcctttatcggcaaaacgtccggccggacccgccatcagggcaccggcggcaccggcgaggccgaacagcccgatagtactttcggaataattaaacggatcggatgccagcaggaaggccattgaggtccagagcaggccgaacgcggcaaacacaatggcaccgagcgccgcccggacacgcagaaccggagtgcggacaaacagcaccacaatggaggccagcaactggccgtatttcagttcagacacctgcttatactgcggcaggcgcagatacaggatcagcgccagcagaaccagcagcccggacgcagcccagtagactgtccgccagccgccgaattccgccagcacaccggcgacggtccgcgccagcaggataccgagcagcaggccgctcataatgatcccgacggccttgccgcggtgctgcggtttggcgatagtcgccgccagcgggataagaatctgcgccaccacggaaaacatcccggccagtgcggtgcccagcagtaactgccagagagtctgtgacagagcagaaatcaccagcccgatagccgacagcagtgtcatggtgacaatcaggttacggcgctcgaatttgtccccgagcggcaccagaaacatcaggccggcagcataactgagctgggcggtggtgacgataaatccggccataccggcggtaacgccgaattgtgcggcaatcgtctccagtaaaggctgtgcataatagttacttgcgactaacagcccggttgccattgccatcaggcagataagctgaggtgtcagaaccgcatcaatagttttctttttcatgattattataagattgattgagtatgaaatgattacgggtacaacggagcgctactatatagaaagcagaccagaaagggtatcgattttgtgagattggtcacgtttcgttgaggataaaaaagcggccacaggactatggccgccgggaggctttttcagatccggttatttatcagcggctttgcgcgcctgctcaatccagccgtcaaattttgcctgattggctttaatccaggcgttggcgtggcgttcaatatctgcctgcgagttttcaccgttatgcatacgcaggttctgggcgttgatggccgagaccggcagtttcatgacagcgaacagctctgcggccgccgggttctgctcagcccaggctttgttggctgcgatatgcatggtgctcggcgggaagccgtagtttttgccgttcggcagtttggtatcaattttctcgccgtccggcatggaggagaacggtacttccagccagaccacatcacgtcccggtttcaggacatcactgatccagtacggtgtccaggtatagtaaagcaccggtttgccttctttataacgggtgatggtgtctgccatcatcgcggcatagttcccctggttgtgctcaaccgtgtctgtcagcttataggcgttcagatggttgttgatggcggcctcacagccccagcccgggttacagccggtcagatccgctttaccgttgccgttgctgtcaaacagcttggcgatttccgggtctttcagctgttcaatattggtgatgtggtatttttcagcggttttcttatcaatcagatacccctgagcggcgttcacgacataatcccccttacggtagaatttatcgtcacctccggccgctttgtactgggaattgtgcagcggcacccagctcacagccataaaggtggcatcaccgttggcgattgacgcataggccacgttgtaatctacttcctgaatcggttgcacgtcatagccgagttcttccagtgctttgttgacgataagggtctgaaaggtttcttcagtaatggtgctttgtacaggcagcactttgacccctttgcccggctgcgcggtgtccgcgaaagcctgagtaccaatgagtgccgataaggcgattgctgcgattgctgtcttacgcatcgttttccctcttgttgtgcctgccgctgcgataacagcggcagggtgataatgagcgggagcggaggccccctgccgtgtgttacggcgtgcggcggaacggacgggtgataagcccggcagggccggtgtgataccagcggcggccggctttgctgcgggaatctttcccgagtgattgtgtcaggcggtcaagaataatggcgagaatgacaatccccgcgccgccgacagatgccagccccatatccagacggccgataccgcgcagtaccatctgccccagaccgccgacggcgatcatggaggcgataaccaccattgacagtgccagcatcagcgtctggttgatccccgccatgatggtcggcattgccagtggcagctgtactttaaacagcatctgacgcggattggcaccaaaggattctgcggcttcgaccaggtcggcgggcacctgacggatcccgaggatagtcaggcggatcaccggcggcagggcgaagataatggtcaccaccacgcccggcacgttaccgataccgaacagcatgacaatcggcaccagatagacgaaggccggtgttgtctgcatggcatcaagcagcggacggataaatttcgcggcgcgttcatgccgcgccagggcaataccggtcggtaacccgatgataatacagaacatcagggcggtcagaaccagtgacagagtcaccattgcttcattccatgccccgatggcaccgataaaggtcagtgataccaccgtggcaagccccagccctttgccgctcatctgccaggcgagcagggcaaagataagaatggcgatcggcgccggaatggcggtcagtccctgttcaaaggtcgtgagcacaaaatcaatcggcacacggatgccctgaaaaaccgggcggaagtgcagcacaatccagttgatggcatccgtcacccaactgtcaaacgggatcagcgagtggtcaaacgggtttgcccagtcaaacgcggggccggtatctgccggtgcggcatccagccagtcactgccgctgtccgccgcgccaccccaagggtcggcatccgcaccgccggtatcggcggcacttccccacggatcactgctgtctgcggcgtcaggggctgtttgtgctgatgaagaatccggctctgatgttgccgcccacggatccagttctgtatcctgttgattattccggctcattcggcgtctccttatctaaagcctgcagcagcatcccttttgagataaccccggcatagcggttgttgttgccgaccaccggaacagcacacggtgactgcgcgacaacggtcagcagctcattgagcggcgtgtcggcgctgaccgcctgcggctcgctcagaatggcgtctgtgataggttttttcgctttcagtgccgcctccagtgaggcaacagaaacaataccggcaaacttttgtccgcgctcaatcaggtaaccgtattcacggtcatcatcattgagaactttcagtgccgaacgcgggccgaagcccggcgccacatgcagcagcgcatccgcacggcggcgggcaatatctttggcgctgaacacatgactgatatccacaccacggaagaaggtacggacataatcattagccggattattgaggatctcatccggggtgccgacctgcaccaccacgccgccctgcataatggcgatacggtcgccgatacgcatggcctcgtcgaggtcatgggaaataaacacgatggtgcgctgtttatcgccctggaggctcagcagctcatcctgcatttcggtgcggatcagcgggtcaagggcggagaacgcctcatccatcagcaggatatccgggtcattcgccagcgcacgggcaagcccgatccgctgacgcatcccgccggacagctcatccggataggaattcgcccactgctccaggttgacctgtttcagtgcatccagtgcgcgctcatgacgttccgctttgctcatcccggccagttcaaggccgaatgcggtattatcgataaccgacatatgcggcatcagagcaaaggactgaaacaccatgctgatttttttacgccgtacctcgcgcagcgcctgatcggaaatcacagcgatatcttcgccgtcgatcagcacctggccgcgggtcggttctatcaggcgattgagaagacgaactaaggtggatttccctgaaccgctcagtcccatgatgacgaatatttcgccttcttcaatggccagattggcgtcctgtacgccgacggtagcaccggtcttttcaaagatatgttctttgtccaggccctgttctaataattcaaatgcctgtttcgggtgctcaccgaatattttataaagatttttaacttcgagttttattgccatgcagtatatccattcagaataacgtggatgtgaaatgggtaaatgtggatcctctccctgaaaaaaaacgttatttaccctagcatacgagataatgctgacaaccccttgtttatgagaattaatcaaaaagaacggatatatttttggtgtaaaatcaccgggatccgctgaatatcttatttcattaatatgtgaataataagcggaaaataagaaaggaagagtaccggaaagttaaccaggcacttgttttaaccgctttttatccggaatgcctgaaaagggaatatgatgatattcagccgggtaatcccggcgtcagtaagttgtgagattcatcgcgaaaacagggaaaaaaaatcacgccacattaaatatatttattaataatgacatgtaattattggtgcaataacagatatttcgcttaagtctgaaaataactcgataaaaacatcctgataaccggaaaatacccccgtaaaaattgatgatttaggttgttttgtgagcggaaaatgcactgatataaatatgctgcaatatcagtgcattaataaaaccggtgtttatagtgtgatacttaaacggaagtgattgatttaaaaatcccagtcttcatcttctgtgttcacggctttacctatcacataagaagagccggatccggaaaagaaatcgtgattctcgttggcatccggtgacagcgccgataatattgccgggctgacatccgtcacactctccggaaacagtgcttcatagcctaagttcatcagtgccttattggcgttgtaatgcaggaatttaatcacatcctcagaccatccggcaccgtcatataatttccgcgtataactgacttcattttcgtataaatcaaataacagactgaaggtaaattcctttatttctttgcgggtttgttcgtcataattctgtaatgaacgctggaatttatagccgatataatagccgtgaactgcttcatcccggataatcaggcggataagatcggcggtattcgtcagtttggcgcggcttgaccagtacatcggtaaataaaatccggaatagaataagaaggattccagaaacacgctggcgactttctttttcagcgggtgcgggtcacggtaatagccgaggataatcgctgctttattttgcagggttggttcctcttcactccagcggtaggcgtcatcaatctcctgtgtggagcagagcgtggagaaaaccgagctgtaagagcgggcatgcaccgcttccataaagctgatattggagagcacggcttcttcatgcggtgtcagggcatccgggataagcgccggtgcgccgaccgtgttctgaatggtatccagcagagtcagcccggtgaacacgcggattgtcagctgcttctctgccggggtcagtgtctgccacaacggaatgtcattggagagcggcactttttccggcagccagaagttgctggtcaggcggttccagacctcgagatctttgtcatcctcaatccggttccagttaatcgcggaaatgcggcttaatgtggtcatgataatatcctgaaataaacggtttatacggcgcaggaaacacagcccgccacttcggtgccttccagcgcggactggcgcaggcgcacgtaatagagggtttttatcccttttcgccaggcataaatctgtgcgcggttgatatcgcgggtggatgcctcatcactgaaaaagagggtgagggataagccctgatcaacatgctgcgtggcggcggcgtaagtatcgataatcttttccggcccgatttcgtaggcatcccggtaatactcaaggttatcgttagtcataaaggcggccgggtaatagacacggccgagcttgccttctttgcggatctcaatgcgggccacaatcgggtgaatggaggaggtcgcgtgattgatataggaaatcgatccggtcggtgcgactgcctgtaaattctggttgtacagcccgtgcgacatcacactctctttcagctgctgccagtccgcctgtgacggaacagcaattccggcatcggcaaacagggtgcggactttttctgtcgccggttcccatttctgtgtgatgtatttactgaaatactccccgctggcataggcggactgttcaaagttacggaatgtctgccgccgctcaattgccagctggttggaggctttcagggcataataggcgatggttaagaaatagatattggtgaaatcaataccttcttctgaaccataatgaatatgctcccgtgccagataaccgtgcaggttcatctgcccgagcccgatagcatgagagccccggttaccgtgttcgatggacggcacactgcggatctgactcatatctgacaccgaggtcagcccgcgtacggcgatttcaacagagcgggcgaaatccggggaatccatcattttcgcgatattcagcgaaccgaggttgcagctgatatcacgcccggtgtggcggtaactgagatcgtcgttgtattcgctggcactgttgacctggaggatctccgagcagaggttgctcatattaatgtaaccggcgaccgggtttgcgcggttcacattgtcctcaaacataatgtagggataaccggattcaaactggatctccgccaggatgcggaaaaattcacgggcgttgattttgcgtttgcggatggccttgttattcaccatgtccgcatagtgctctgagatgcttagctctgacatcggtttgccgtaaatccgcgccacatcgtacggggagaagaggtacatcggctcgttatttttggccagctcaaaggtgatatccgggatcaccacaccgagagacaaggttttgatacggattttttcatccgcattttcccgtttggtatcgagaaacgtgaggatatccgggtggtgcgcatgcagatacacggcacccgctccctggcgtgcgcccagctgattagcgtaggaaaaggcatcttccagcatcttcattaccggcaccacgccgctggactggttttcaatcagtttgatcggcgcaccggattcacgcaggttggtcagcagaaacgccacaccgccgccgcgtttcgagagttgcagcgccgagttcacactgcgcccgatagactccatattgtcctcgatacgcagcaggaaacaggagacaaactccccgcgctgttttttgccgcagttgaggaaggtcggggtggcgggctggaaacgtccgctgataatttcctccagcagatgctctgccagtgtggtatctccctgcgccagtgtcagcgccaccatacagacgcgatcttcaaaccgctccagatagcgctggccgtcaaaggttttcagggtataaccggtgtaatatttcagggcaccgaggaaagtcgcaaagcggaattttttgctgtacgccagacggaacagatttttaataaattcaaaatcatattgtgcgataacgtcagcttcgtaatagttttcattaatcagaaaatcgagcttttcccgcagattgtggaaaaacacggtgttctgattcacatgctggcggaagtagtggtgcgctgccgtcacatctttatcaaactggatccggccctctgcatcatacaggttgagcatggcattcagggcgtggtaatccgtgtattcagtggtcatcgtgttatcccggaatcaggtaagcagcactcagcaggcggtctcagcggcctgctgctgccagaattggtgtaagccgcggcggacgttatcgacatccgcctgtgtgccgagcagttcaaaacggtataaaaacggcacctgacatttggcggcgataatgtcaccggcgatggcataagcgcggccaaagttggtatttccggcggcgatcacaccacgcagcagtgcccggttctcaggccggtttagaaagcggatcaccggacgcggcaccgcgccgctgtgatggccgccgccgtaggtcggcaccagcagcacaaagggctgagtggcggtaaggtcaccatcttccggcagccgtgtggccgggatccccagtttttccgtgaaacggtgacaggtttctgaacgggtggagaaataaatcagtgcctgcgtggtcatggtgcctccggcgtgtgcggttcagagggcggcaagtttgtcgggacggaacccggcccagtgatcctgaccggcgatcaccaccggcacctgctgatatcccagtgtgcggacatgctgatacgcctgctcatcctgagtgatatcaatgacactgaacggaatatttttccgtgtcagcatctggtaggtggcattgcactgcacacaatcgggtttgctgtagatagtcactgtcatggcggtttcccgtggttatcgctgcccgttatgagcagatatcgtgggttaactgtgttttgaatactatatgtagatattaaatatatcaaccacactatatatggtgtttttgtattttgaatgattatcactattattaatccggatgtgagtaaatgcatgatgaactgtctgcacggtgaatatgaagagggggaaaatccgcagcgacaaatgtccccgtcaggcgtacaataaaaaaatctgaactgtcttttgcagacagctgaatttattggcatctgaactgaaatcacacatttattatggaattagctccgtcttcccgaactatccgcacactccttgcttctgataccccgctgattgatgtccgcgcaccggttgaattctgccagggagccatgcctgcctcacacaatctgccgctgatgaatgatgaggagcgggccgctgtcggcacctgttataagcagcagggcgctgaaaaggcgctggcgctggggtatcagctggtaaacggtgagcgccgtgaacagcggatagcagcctggctggcggcctgtgcggattatccgcagggctatctctgctgcgcccggggtggtcagcgttcacatatcgtgcagcagtggctgcgggatgcgggaacggaatacccgctgatcaccggcggttacaaagcactgcgtcaggcggtgattcaggtgactgaagagctggtggcgcgtccggtgatcctgatcggcggctgtaccggcagcggtaaaaccacgctggtgggcgaactggctgacggtatcgacctggaagggctggcgcatcaccgcggatcgtctttcgggcgcaccctggaggcgcagtttgctcaggcgacatttgaaaaccatctcgctgccgccatgataaaaaaagaaaacgccggaacccgctgggtgctggaggatgaaggccgcgccatcggtgccaacggcctgccggagccgctgcgggtgcaaatggcacaggcttcgctggtggtggtggaagatccgtttgagcgccgtctggaacggctgaaagaagaatattttgaccgcatgactcatgatttcaccgccgcatacggtgaggaaaaggggcgtgaggcatacagtgagtatctgcatcacgggctgtcagctatccggcgtcggctcggtacgcagcgggcggcggaactgactgcgctgctcgacagtgcacttgcggagcagtggcgcagcggcaataccgaagcccacttctcgtggctgtgtccgctgctggaagaatattacgacccgatgtaccgctatcaactgagcaaaaaagccgatcgcatcctctttcgcggcacctatgaagccgtcgctgactggctgaaataatccgccgtctcatcattcgtcacaaagctgttcaccggggtatcattttccggtgaactgacttgcatgaattcatttgcctcgttattttctctgttgtgagatgaatgacgtaaatgatgtttgtctctttatcataattaggttttgctatagcaaaaccagcacaaagggcagacgtatggcgacgacttatataaaggctccggccggatttccccgccgttatatcattatcagcgcggatgagcaggggattactgaactgggttttgatgatactgcgccggagcagacagacagtgataacccgtatatcagacagtgtattcatgagctggatgaatatttcgccggaaaacggcaggatttcagtgtaaaactcaatccgcacggtacagaattccagacccgggtgtgggcgcagttatcaactattccgtttgcgatcacctggtcgtataaagatctggcgctgaagctgggctctgccaattactgccgcgcggtcggtatggcaaacgggcgtaacccgatttgtctgattattccgtgccaccgggtgattgcacacgacggttcaatgggcggatacagcagtgggttggatatcaagcagtggctgttacgccatgaaggcattatctgagtaaaaaggtggcaaatgttgctgaccgttgaaataaccaggacaaatcctctggtatatcagcggaatatctctcacaatgacgttatccggcgggtagtttagtatcgaaccagattgcccggcaggatcaatacagtctgaaaacgactggccgggtactgatgaagtactatcacttgttaaagggtttttttgaatgtcaaagcgcaaaggtaacgtgaagtggtttaacgaagcaaaaggtttcggttttatcactccggaagacggcagcaaagatgtgtttgttcacttctctgcaattctgaacgacggtttcaaaacactggcagaaggccagaaagtagaatttgaaatcgttgatggcgctaaaggcccgtctgctgcaaacgttgtctcgatttaagttgtaacacgctataccgtagccgttattttaattcgacattatcgtgacgaaaacccgttactcaccatagtaacgggtttttttatatcagcgccggttggcgacctggctgagccagacactgccgatcaccacgataacccccgcacactgtaacaggctcagttgctgatccagtacaaaccagcccagcagtactgccgtcagcgggctgagaaaaccgagcgatgccacggaattcggcccgaggatcgccagcccgcgaaaccagaacagataggtcagtgccgcgccaatcagccccagatacagcaatccgctgatattgagcagcgtcagcggcggcagtgccggttcaagcagcagagagaccggcagcagcagtaatccgcctgcggtgagctgccaggtggtaaaggtcagcggtgacacatccggctgccagcggcggctcaggaccgtaccggcggccatggagaatgcaccggctaatccggcaataataccgatagtgtcgagttttgcctgcggcgtcagtaacagcagtgctaccccgcctatcccgcacagtgcgccgagcaccgccagcggcttcagtacattgcccagcaccatgcgggagagcagcagcacaatcagcggctgaatagcgccgaccgtcgcagccacgccgcccggcagacgataggccgagacaaacagcagccaccagaacaccgcgaagtttagtgccccgagcacgaaaatccgcccccaccagatccctttcggcaactggcggataaacagcatcagcagcagaccggcgggtaaggcgcgcagcatggcaacggtcatcgggtagcctgcgggcagcatttcggtggtgaccagataggtactgccccagacggcgggtgcgagagctgtcagacataaaacgccactacgtttcataatttactcattaataatgtgatatggaacgcatcataatccgcatcagttgcggggggaatagcggctgcggggcagagcacaaaagacatatttccgatcaggtaaaacgccggtaacgggcaggcgaacgaaaagcgtaagcgccatggatggcgcgatccgagcgcacaaggatgtgtttacagcgacttttc

SEQ ID NO: 116 - DNA, 246 bp, unknown
  Altogen 322075 strain
agcgtcatcaccggagcggcaaaaaaaaaccgccgtttttcagcggcggtttgcgttattcacagaacagcgggaaattacttaacttcttcgcctttggcctgcaaatcagcatggtaagaagagcggacaaacgggccgcaggcggcgtgggtgaagcccatcgccattgcttcggctttcatttcctcaaactcttccgggctgacataacgctgaaccggcagatggtgacggctcggctgg

SEQ ID NO: 117 - DNA, 290 bp, unknown
  Altogen 322075 strain
aaccggccgattttacaggtaaacaccagcccggactgccccggcaacaactcagaaatggatggtatcacgccgactccataaatcagaaaacacggactcccgcacatcgctgccaccggacagtatcattgcgctgaacccgtcattgaaaacagagcggcccggaagcaatacgccccgggccggtatcattacgcttcgattggtgcacgccagtcatcagcgccggaggtgcctgcaacggtatgttcccagtcgatcttgcggtaagagagtgacacttcgat

SEQ ID NO: 118 - DNA, 224 bp, unknown
  Altogen 322075 strain
tcatggtgtgtctgctcctgttgtgccgaacgcgcccagtgagctcactcccggcgtggtgtcctttgtgtgatccggctgcgggatctcagcctctgtgaccggtttttctgtttctccggcagtgtctgtcagcggcgtttctgcggtgaacgccaccggcccggaggcgctctgtttcatgtcatagaacggcgatcccatccactgatagattttgcgtt

SEQ ID NO: 119 - DNA, 767 bp, unknown
  Altogen 322075 strain
ccgccattgttacgtctgatagctagataactccctccaccatagttcggaataatcagatgatgcgaaatattattggaataccgtgtaaccagtgcggtaccaaatcccacaacagtccggggaatatttgaggaggaatttccgtaccagtactgaccggttggcgtgacgaaactattaaaatctgtaattcctttaccacccgcctcagcaccgataccaaaccctgtactgtatttcacatacacctgagtggccagcacaccggaatcatacggcacagtaataacgtgctggttttcgccgttagcttgccgatacgcaatgctaagcattgatgctgtacctgcatgaggatttgtctccaataacacataacgaccatctgattttgtcagtctgaagccggtatactctcccgttccgttcaaagatgcatagctgctgggtgcattaacaacaaacgggttttgttttttatatgtatatccgaattgacctccaccgctgacccacagatacgaatcagatacagctttaaccactgtggtttgattgccggggttatttgataacataccattaacccattcccgcgaagccagtccttttacatcctccagcgtcactttttggccgttcggcagctcaatttccacctgaccggtatctgtcatccactgctgcatggcccggagaaaatacacaatatagccctgattggctgacatggtgcgggctgcatctgaaattgtgtccggtac

SEQ ID NO: 120 - DNA, 562 bp, unknown
  Altogen 322075 strain
aaccgataccaaaacctgtactgtatttcacatatgtctgcgtggccaacgcacctgagtcatacggtatagtaataacgtgctggttttctcctgatgcatttctgtatgcaaacgtcagcatcgatacactaccagcatgcggattggtttctatcagtacatatcggccatcaccttttaccagattaatgccggtgtaatcccccggactttttacttctaattcccggaaatgggcttttgcattcccgtctaccttccagttctgatgtggaccgaggtttccgccgatatccccattatcattaacataaatccctctcgttttggccggtgactgaatctgtgtcagctccccgcttgtcaggagcatattgttaacccattcccttgaagccagcccttttacatcctccagtgtcaccttctggccgttcggcagttcaatttccacctggccggtgtctgtcatccactgctgcattgcctggagaaagtaaacgatatagccctgattggctgacatggtgcgggccgcatctgaaattgtgtccggtac

SEQ ID NO: 121 - DNA, 102 bp, unknown
  Altogen 322075 strain
tcaaatccggctcccgcaaccaatttttgaagtgcgcagtctgtgaatacaatgtgatatgctcagttaatgatattcggacgcgggatggagcagcctggt

SEQ ID NO: 122 - DNA, 102 bp, unknown
  Altogen 322075 strain
gaaacgcagaccatcgtccattgcgattgggtggatcagggtgacgatcattttgatgttgtcgcccggcattaccatttcaacgccttccggcagttcgat

SEQ ID NO: 123 - DNA, 102 bp, unknown
  Altogen 322075 strain
aaaaatccccgctattatctgaatgctgagtttatccgccgggcagatattttatcttttgcgatggatccgcaattttatcatgatgacccgtaccggaaa

SEQ ID NO: 124 - DNA, 105 bp, unknown
  Altogen 322075 strain
ggagcatgtggtttaattcgatgcaacgcgaagaaccttacctactcttgacatccagagaacttagcagagatgctttggtgccttcgggaactctgagacagg

SEQ ID NO: 125 - DNA, 105 bp, unknown
  Altogen 322075 strain
tgatgcggcccataacaccggggcggaatccaatgtttacggtatgacactggataccgcagtaccgacccagacggtcaccatcaccgaaattatcgatgataa

SEQ ID NO: 126 - DNA, 107 bp, unknown
  Altogen 322075 strain
cgccggactttcgtcaggtcgtcatgcagtagcgctttacattcagcatccgtatacaacttgccaggctgaatgtcactgccggtatggccataacatacggtgag

SEQ ID NO: 127 - DNA, 108 bp, unknown
  Altogen 322075 strain
ggtcagttcaaagataaagctgatcagcttattcgcatccactttggcggtacttgcgtactgcccgctgacgcggacatcatccacggcttttttggtggaggtcag

SEQ ID NO: 128 - DNA, 109 bp, unknown
  Altogen 322075 strain
gatgaccgcgtacagaaagatggcagtattatcatcgaaacctgtcaccgtcagcatgcgcatttgccggaacgtttccagaactggcggctgaaagaggtcaccccgg

SEQ ID NO: 129 - DNA, 110 bp, unknown
  Altogen 322075 strain
gcgttaaaaccgataagggtgttcacctgaccacctttcagctcagccccgatcaccataccggcggaataatcctcaccgttataacggatccggactttcatatcgtg

SEQ ID NO: 130 - DNA, 110 bp, unknown
  Altogen 322075 strain
gtcggcaacatctatgtgcagggtcatgaagatgagatgctggtgcagcagtttgaccatatcgttactgttccgacagacccgcagtccggtcagccatccggccagcg

SEQ ID NO: 131 - DNA, 111 bp, unknown
  Altogen 322075 strain
gggcgataaaccgtcccatctctccgtccgtatccgtctgaacccgaaaatcggctgacaggctgctcaggaataataaggatattgctgcattttcatcacagcgatgtg

SEQ ID NO: 132 - DNA, 112 bp, unknown
  Altogen 322075 strain
tttgcaacgattttaacttaagtgacagatcctgtgagatacagcccttcctctggtctttacttatccgtaagtgaaatttatgctttaatcattatcaccatgcgcactg

SEQ ID NO: 133 - DNA, 112 bp, unknown
  Altogen 322075 strain
cggaatgatatttttattgttataattcattgcattacgcgatatttgcatttggttaaatatttatttttctgatcataagtggaatggttgttttctctattctttacag

SEQ ID NO: 134 - DNA, 114 bp, unknown
  Altogen 322075 strain
gtccggatcataataccggaatgtgttatagtgtaaacccgtttcacggtcgaggtactgcccctgaaaacgcaggttctggctgtatttgtgcccgggagtgtgcagccgtcc

SEQ ID NO: 135 - DNA, 114 bp, unknown
  Altogen 322075 strain
atgtgccgggcggcggcggtacctggtcaccgcgtaacgacagcaaaactttcagcggccgtgtgatgctggtggatgcgctggcgcgctctatcaacgtaccgacggttaacc

SEQ ID NO: 136 - DNA, 116 bp, unknown
  Altogen 322075 strain
ccgacccagagtgtgaaaatcacggaggtctgggacgatgtcaccccgggactgggggatatcggtcagaacggctggaccaacgacaccgcgccgcaggtgcgcggcaccctgag

SEQ ID NO: 137 - DNA, 119 bp, unknown
  Altogen 322075 strain
tttttctattgcctggacaacagcatcaccgttttacaaaaaatgcattttgctccatgcggatttgatgcggaaacatcaaagtgcgaagtccggtattgtgttccactgcaacaggg

SEQ ID NO: 138 - DNA, 119 bp, unknown
  Altogen 322075 strain
gcattgttattcgtattgtcaaatgcctgaccacctattctgacccagaatgatgatctggctgcaatcatttgtgtgtttgggtggactttagtcggaaaataaacctctttaatggt

SEQ ID NO: 139 - DNA, 122 bp, unknown
  Altogen 322075 strain
tcagccaaagtcggtaccgtgaccctggatggcgatgtggtgcagaaagtggcagatggcgtcaatgcgttcacctacaccgcacagttggtggacggtaacggtaacccgatccgtcaggc

SEQ ID NO: 140 - DNA, 122 bp, unknown
  Altogen 322075 strain
gcgcaccgtccgttcaaatttaccgttgcgctgaataaagcggttccgctgctgtataacgccctggccgccggtgagatgctgccgaaagtgcagctgaaatggtaccgcacctcggttga

SEQ ID NO: 141 - DNA, 125 bp, unknown
  Altogen 322075 strain
agaatgcgggagcattttttctctgcgttatcaccatattcctgacgttttgcgacactgaatgctgaaataatcggagaatggttgaacgaaaataccatcaccggaatcgccagccacagcgt

SEQ ID NO: 142 - DNA, 126 bp, unknown
  Altogen 322075 strain
acataaaccagctcaaggccgttattgtctttcggtacggaaattccaccgtttacaccccatgcgccatctgagttataaccaagaatgccggtaatgtgatattggccggtgccggtacggcgg

SEQ ID NO: 143 - DNA, 128 bp, unknown
  Altogen 322075 strain
gcgttcagcgcctaccgcgagcagttttccgaccgcgcggcgtccatcattgagttcctgctgcaattgcgcatcatgagcctgcacaacgagcgtatttccgatatcgccctcaacgagcaggaaaa

SEQ ID NO: 144 - DNA, 132 bp, unknown
  Altogen 322075 strain
aatcattttcggcagtggatatcaccatctcgccgtattctaaacgcggtgtcatatatcctcctgaacattatcaagggcatccggagataccctttgtaatatttaggccgcagtgactgtaacgacaca

SEQ ID NO: 145 - DNA, 133 bp, unknown
  Altogen 322075 strain
attctctgtacaaataagttacagagattgtcattgggtgatccctatatctattgcttataaacttaaactttgcacccacaggttttttattgcctgaaatccaactcgtaagagttacttacaggttcaa

SEQ ID NO: 146 - DNA, 136 bp, unknown
  Altogen 322075 strain
taaccaatcaggtggtatataatactaactggggtgttgcaaatatactgcatgttcagcggctaaaactatggcctgatacaatgtggtctatgacaatgcctaataatggtaataactgtgcagttgtatttgg

SEQ ID NO: 147 - DNA, 136 bp, unknown
  Altogen 322075 strain
gttgagtatatccccgataattccgtaatttcaatatgcggaacaaataaaaaatgccctgtaagaacagggcaagtaagcaatcgacaaagaatatttactctaactacgatgctcaatatacaggcaattttgc

SEQ ID NO: 148 - DNA, 143 bp, unknown
  Altogen 322075 strain
aatcgttgcaaaaacaggatatacgacttgaaaaaactcatacgcctggttgattcagtgaaatatgtcagatcagaaaaaaacaaacaatcatattttttaacatatcccgctaatacactgtaaagaatagagaaaacaac

SEQ ID NO: 149 - DNA, 144 bp, unknown
  Altogen 322075 strain
acacggttttatatgttttggtgacaccggccggatgcaaattgacggcactaatatagcgttagggctaatcagaaaacagtcgtttcattgtccgaaagtgcaggatgcaggacagggaaccattaaagaggtttattttcc

SEQ ID NO: 150 - DNA, 149 bp, unknown
  Altogen 322075 strain
tagttctccgactgcattttgtcagtgacaaccacactgttaagccatgcctgattaatgaacgcctcacgcataaagacctgtccgtccttcatgtacatgaacatgtccatcgattttttcaccggattataaaacgcaaactgctg

SEQ ID NO: 151 - DNA, 153 bp, unknown
  Altogen 322075 strain
attatataccacctgattggttaccgggtttatcacaactattcccattttttgattacgtaccttaacaggggcgttaccaaactcccagacttctatatttccgccggagccgtcgcgaaaaggcatagagacaaaagcattgttattcgt

SEQ ID NO: 152 - DNA, 155 bp, unknown
  Altogen 322075 strain
gctatcagacgtaacaatggcggggcgatagaggatgtcgttgccctgacatccaatatgtatatcgtagacggcagtggatattataaaaaatcgtcgccaatcgttcagatttaccctgatggccattatgaaaccaacgacgaatccgaagg

SEQ ID NO: 153 - DNA, 159 bp, unknown
  Altogen 322075 strain
ttcgaatccggtatccggcaccatttttgtcgattcccacccacccgtttcctgcaacactgaaagtggaacacctgactggatcagccggctcgcccgggtgtatttaaggccgtgaaaacgaaaatcaccgataccggttatcccggatgaactgac

SEQ ID NO: 154 - DNA, 159 bp, unknown
  Altogen 322075 strain
ggtcggtattgaggagatgtcacgcaattttaccggcgtggcgctggaagcctggcccggcagcaccttcacaaagcaggaggtggtgaaaaaactcagtctgcgcaagctgatcggcaatattcacgggctgaaaaaagcgctgctgaaaatcttcgc

SEQ ID NO: 155 - DNA, 161 bp, unknown
  Altogen 322075 strain
aataacccaaaggttgaatttggtgtaaaactgtttaacacgcgaacataatgcttacgctgatattctgtaaattcaccggtacggctcagagtaaagataatcagccggttattattcgggttagtgtccttatgataaggcagtttaatcagagattg

SEQ ID NO: 156 - DNA, 163 bp, unknown
  Altogen 322075 strain
tagtgtcgcgcggttaccgccgctgccgatggtctggaacagctgagagacctgcaatggtgtcaggtttaccgcaccgagcagcatcgccggaactttctggatatttttcgccggcgccccgagacggacaaaggtatccgccactgcatccagaccaacc

SEQ ID NO: 157 - DNA, 166 bp, unknown
  Altogen 322075 strain
cgtccatttccagttttacatctcccattatgagcattccttccaccagcccttctgccttctggagttttttccctatgtgagtgtctgagcacccgtatttcttcgccaaccggataaacgttttaccgaaaacatagtagtcaaaaagcagatcatgcatatc

SEQ ID NO: 158 - DNA, 169 bp, unknown
  Altogen 322075 strain
ggtcacgccgagaacggattcctgctctgtcacatccagtgactggaacatggcactgaacccctgtaacagatccagtttggtcagcacgatatataccggcgggcgggtgttaaaggcaagacggatatcctgcaggcgcatgtgaatatcggtaaaataacggctg

SEQ ID NO: 159 - DNA, 172 bp, unknown
  Altogen 322075 strain
ataaagcacaggcagagaaaaataccgcgctgctgaatgacaaaaatgccgatttggcgaaagtcacccgcagcctgaccgatactgagcagaagctgaaaaacgccgaaacagaaaaacagaaacttgcagatcaactggccggtcagaataaagatgcggcagcacagag

SEQ ID NO: 160 - DNA, 173 bp, unknown
  Altogen 322075 strain
gccgctgctgcaggagccggagcggctgcggcaggctgtgccgccggtgctgcgcccgcaacttcaaagaccatgatcagggaaccggtgctgactttatcgccgacagcaactttgatctctttaaccacgcccgccatcggagacggaacttccattgaggctttgtcgcc

SEQ ID NO: 161 - DNA, 174 bp, unknown
  Altogen 322075 strain
ctgccgatatgatctgcctgagaggcacgaagtgtactgtctgcatccgtggtgaaacgtccgctgaacccgctgttatccgctgtcagctgagcatccgatttctgcgcaatttcggtggtgccgctgccggtcagctgattacgcagcagaccctgcgagccttccgtgcgc

SEQ ID NO: 162 - DNA, 175 bp, unknown
  Altogen 322075 strain
gagttatggggctgtgttttcctgtaaatgcgatgtatcgtccccacaacaataaagcaatggagtatatacaaacaagatgccgaagccgttccggaagcgggatgatcgaccgtaagaatctgaagtttatggtatcggaactaaaacgcgggcaggctatttggtttgctcc

SEQ ID NO: 163 - DNA, 176 bp, unknown
  Altogen 322075 strain
tagggaaccgccaggttattatttaaagtctgtgcaaaagcgcagatttttgctgatatggctcagttggtagagcacacccttggtaagggtgaggtccccagttcgaatctgggtatcagcaccattaatttagttcggcagaaattgaaaagaatttgcctggcggccgtagc

SEQ ID NO: 164 - DNA, 181 bp, unknown
  Altogen 322075 strain
ttactctaaatatttcattaattcttttgtcattccagaaccaggcaataccggtttcaaataatgcaatccctaaagatgatagattacttgcgaccatactctctatctggattttatttctgtcaggaaaacataattctaaattttttttaattatggatacccgccttttcaggaa

SEQ ID NO: 165 - DNA, 194 bp, unknown
  Altogen 322075 strain
ggccccggcgcgttctcgcgctccactatgctgcgcaaactcaatgccggtgatatcgccggggcgtgtgacgaaatgaaacgctggacatttgctggtggtaagcagtggcagggtttgattaaccggcgcgaaacggagaaagcggtatgccacggaaccctttagtgctgatcatcattgctatcatcctg

SEQ ID NO: 166 - DNA, 195 bp, unknown
  Altogen 322075 strain
cccgccgcgattatggcggaaatgatcgggttactttaggtcaacgggaagagaaatgaaaagcattgccgattttgaattcaatggtgcgccgttactgagcggcattatgttagtgttaaaaactgtccgtccggattttgaccgggaaaaggcagaagcacacatcaatgaacttatccgtcagacccgtaa

SEQ ID NO: 167 - DNA, 202 bp, unknown
  Altogen 322075 strain
cggttaaacccggcaaactgcggctgggagccgccgaccatcgcgcggacttccccgctgatgcggtcaaccaccaccatcgccccttccagatccggttttttacgttccgcacggatggctttcacgccttcctcaacggcattttctgccgcatcctgtgagaccggatccagtgtggtgaagattttcacgccggaca

SEQ ID NO: 168 - DNA, 222 bp, unknown
  Altogen 322075 strain
cagccgcttctgcagcaccgttcccgccgcatccggtttctcaggggtacgtacagatgctgggagtctttatggacacactggttatctgcagcgccaccgcgatgattattctctcctcaggtgttctggataatccgccgggcgatatcaacggtattgagatcacacagctggcgctgagctcggttgtcggcagctggggatccacctttgtggcgg

SEQ ID NO: 169 - DNA, 223 bp, unknown
  Altogen 322075 strain
ctgattaaatcagacagatataagaaaagcgccctgagggcgcttttttattgcctgcgatccggccttcaacaaaagttgaagaagcttaccaggacagaggcacaacctccgctttctccgctgccgtaacgcacttctaacattttcaacatcttttcactgattaaaaaatcctgctaaatcaattcggtaaatagcaaccagcagaaacacactgttt

SEQ ID NO: 170 - DNA, 226 bp, unknown
  Altogen 322075 strain
acggcgaaacccgtaacatgactaagttcggtggcaacggtttaggcgacatcgctaacaaaaccaaaaacatcgaattagtagcacagtaccagttcgacttcggtctgcgtccatccatcggctataaccagtctaaaggttatgacctggataacggtgcttacaactcagacctggttaaatacatcgacctgggtgcgtactactacttcaacaaaaacat

SEQ ID NO: 171 - DNA, 247 bp, unknown
  Altogen 322075 strain
cagtcgtgatttacgtgtagtgatacgtaacatctgagggataaaataataaagtttgctatttgtgatcatctgtggcttaatggcatcactggtttggaagtacaggcctatttatgctagtcagtttaaagtcgttcaccatttagcgttatccccgataccacttcattgcgaattccttctaattaattcccataagtaaaaataaaaaacaaacctaatatgccttatggcaatcaaaaaa

SEQ ID NO: 172 - DNA, 273 bp, unknown
  Altogen 322075 strain
tgaactatggaggaagcgtgttctctgtgagaacggggtgcatagtaatgtggtcagaacggattgtcaaagcgaaaatcagagattgtgatctgtttgccgtacttatgagcattccggcggaataatcatcaaaatcacggggttaacaggtataaatccggattttcacccacagagaattcatcagaagcagtgcggaaaaagaagaacagtggaaatgaaaaaagcctgctcagtgagcaggcttttaaatttggctcctccagctgg

SEQ ID NO: 173 - DNA, 277 bp, unknown
  Altogen 322075 strain
tcaaattctgcggcctgagtcagaatctggctttccagagacgtaacctgcagaatattctgctcattctgcccgcttaaacccagcaggctgctttgctgggaataataaagtgcagcctgattcagccactgatctttatttatcagccctctctcccggtagtgatgataattatccatattctgtttcataatgcggatcccttcctgcgcccgttcaataatcccggctgatcgcaactgtgcctgcacataaagggatttttgtttttcga

SEQ ID NO: 174 - DNA, 292 bp, unknown
  Altogen 322075 strain
cagccgataagaaaaaattatttctttgcgctcacagtctgggagagacagcggcgttactgcatgctgctgatttacggcaaaacgcacctgttgtttacacttatggtatgccgcgtgtctttaccaaaacagcggtaacagctctcaaagatatcaatcatttccggcatgtgaatgatgccgatgcggtcactaccgtgccatcgaacaccaatatggataactggttttttgaactttgggggccatttggggtgatactggggactgcctggactattgccactgc

SEQ ID NO: 175 - DNA, 296 bp, unknown
  Altogen 322075 strain
gacaaaatacatcaaaatgtcccgttaagaatgaattgctgttatcacagaaaaattaagaaagccgttcttttttatcacgtaaaacaggtgaatatcgcgtttctacccctctctgtttttaagcactgtcaaaaataataacagcggtaaagcaggcagccgccgccaggcagaagaaaatattaaccttttaaaaattaatgagttatgtgttgctaatttggctaacacatcaatatttgactaagggaaaacctttagtgataattacaaacaatttgatgtattttgtc

SEQ ID NO: 176 - DNA, 315 bp, unknown
  Altogen 322075 strain
acggtaacctgatcaccggccaggaagttattttcacatcaacgctggaaaataccacggtcggcggtacatctgaaaataccggcgggacctatactgcaggtctgacagggacgacatccggtaagacaacaatcggtgtgacggtcaatggtaccgtactgacgatcactgcggcagaggtcactctgacagcagataaggatcatccggacagcggtaagtcagagctgacggcggtcccggatactatcgtggcaaataacacggatgaatcagtactgaaactgaccctgcgtgatgtcaacggtaacc

SEQ ID NO: 177 - DNA, 319 bp, unknown
  Altogen 322075 strain
ggcgctgccgtgtgtgtccggagtgtcgtcatggttgcgaccttttttatccgtcagaagaaaatgtgtttagtatactaaacaataaacgtgcaaatgttaatcataaaatactgttttaaagaagcagtaacatgtaaaaggcccggtaaacggcggacagccgcgcttttcaggttattccgttatcttcgttaccgtagctgttctactatggtgagttatggtgtacacagcggcctgccggtatacggtgccggaatcgtgatgataattatcagggagttaagtaatggcattaacctttggcgttaaaagt

SEQ ID NO: 178 - DNA, 338 bp, unknown
  Altogen 322075 strain
tccggggaaacccgtctgctggtcttcctgatggtcagtgttgccgggctcggcgcgtttatgagttcgaccggcgtggtggccatttttatccctgtcgtgctcagtgtctccgcacgtatgaaaatctccccctcgcggctgatgatgccgctcggcttcgccgggcttatcagcggcatgatgactctggtggcaacaccgccgaacatggtggtgaacagtgtcttggaaatggaaggcatcaaaggctttaacttcttctcgattacccctatcggattactgatcctgctggccggtgtcggctatatgctgattgcccgccactggctggg

SEQ ID NO: 179 - DNA, 368 bp, unknown
  Altogen 322075 strain
aaacttcgatccgtctatttcctggaaagacctcgaatggatccgcgagttctgggaaggcccgatgattatcaaagggatcctggatccggaagatgcgaaagatgcagtgcgtttcggtgcggacggcattgtggtctccaaccacggcggccgccagctcgacggcgtgctctccaccgcccgtgctctgcctgctattgccgatgcggtgaaatcagacatcactattctgagtgattccgggatccgcaacggccttgatgtggtgcggatgctggcactgggagcggattctgtcctgctcggtcgtgcttttgtctatgccctcgcggcacagggacaggcgggtgtcgaaaacctgctgg

SEQ ID NO: 180 - DNA, 441 bp, unknown
  Altogen 322075 strain
ccggtccgagtgcaggctgtgccgggtcaatcagcgtatcgaggtcgcggatggcacgcagcccgtccacatgaccttcgccgaacagatcaccgccttccgtcacttctttaatcagctgttcaaagctgatgcgctgccatttgccttcaccgcgtttaccggcgcgcttcatcggctccagaatacgcagcgggctgtgcagcccttccatcagtgtcgcaccacgggcacaagcggtggaacgtccttccaggccgctttcgccgcccatatttttcagggcttccgccagcggcgtgttataggcgatatggtggtcgtgagagagcggatgatacgggttaccggcaatgcggatcacctgattggtttcgcggtcaacacgggcacggatcccgcactgcgtccagcagccgaagcactgggtcattgagaccg

SEQ ID NO: 181 - DNA, 460 bp, unknown
  Altogen 322075 strain
ggcaaagtcagtcttgattatgcagatatgttcagcccggtcacgaatccggcattttctcaggagcagggacgggctatcgcccgcgcgatcaattttgactgcacgccggggaaggttacccgtctgcagtatgaataaaaaataatggtcagcaccgttcttaacagagcggtgttttttctgtggtaaaatgaacgtttctttgagttgagtgtctgtagcatgtagaatgctgccaataagtctattaaccagcaatatagagtgttggctttgagtccttacaggtgtccaaagctagttttatagggcattacaaagaagaattttatcttgaaaatcaaccatatccgaaatttttccattattgctcatatcgatcacggtaaatccacgttatcagatcgcattattcagatttgcggcggcttatccgaccgtgaaatggcggcgcagg

SEQ ID NO: 182 - DNA, 467 bp, unknown
  Altogen 322075 strain
tattgatttttttgaacgagatttcggcatatcgcgctgcagacagtgatttacatagggttcataaatttacccacaaagttatccacagcttgttattttttatttcccgggcaaacccgtcctgttctgatgtgcgggaagattaacggctgaggccgataatagtcgtctgacgccgcagtctgtggcatgctacccgcaagaatccatttaatactgtgaaggcaattatggctcagattgcagacaaccctttgattttagtcgatggttcatcgtacctctatcgtgcttaccacgcattccctccgctgactaacagtgccggacaaccgaccggtgccatgtacggcgtgctgaatatgctgcgcagcctgataatgcagtatgaacccagccatgttgccgtggtatttgatgccaaaggtaaaacattccgtgatgaattgtttgaagcctataaa

SEQ ID NO: 183 - DNA, 470 bp, unknown
  Altogen 322075 strain
ccagccgtagcagggattgggagccgagggatcttccggatcccagcgctcgataatataggtgtaaatggcattcgatggtgtccccgaggattcggtgatatatgagaaaatcgatgcccccgccgaagcggaccagagcagcgcgaccgccgccattattttcataaatctgttcatagcgagcctcagttacccgtcagtcataattgagatgaaatgtcgcaatggcactgaacggcccgcgtttaatggttttgtttgccagcgcatccggctctccctgtacataggcgcgaaagttcagcagtgtcagcccgtcattcagcgtgatctgcggtgacacctcattgaccgccagcgccgtgccgtccgcattttccagcccgaccgcaataccctccgcctgactgcccgggcttatcgccagtgcgccgctgataaacggattctcatccccggcaaacatc

SEQ ID NO: 184 - DNA, 530 bp, unknown
  Altogen 322075 strain
tttgaacgtacgaaaccgcacgttaacgttggtactatcggccacgttgaccacggtaaaactaccctgactgctgcaatcaccaccgttctggcaaaaacctacggcggtaacgctcgtgcattcgaccagatcgataacgcgcctgaagaaaaagcacgtggtatcaccatctctacttctcacgtagagtacgatactccgactcgccactacgcgcacgttgactgcccggggcacgccgactacgttaaaaacatgatcaccggtgctgcacagatggacggcgctatcctggttgttgctgcaactgatggccctatgccacagacccgtgagcacatcctgttaggtcgtcaggttggcgttccttacatcatcgtattcctgaacaaatgtgacatggttgatgatgaagagctgctggaactggttgaaatggaagttcgtgaacttctgtctcagtacgatttccctggcgacgacacgccaatcgttcgcggttcagcgctgaaagcactggaaggcga

SEQ ID NO: 185 - DNA, 672 bp, unknown
  Altogen 322075 strain
atggccgaaaccgtcaccttcctccagaatcaccgcatccttgatatgcacctgagtaatatggtcctgcatgactgccagcgcttccatcggtaattcacaggcattgatcatattgccgaaatcaaataacagcgtcagttccgggaaatcagcttcttttatcagcttaaccagctcgtggctttttaaatcttcatgctgttccagaacaaatgtcagcccggagtgctgatagtgtgtttttaaataaccgatatctgcggaaatacggcgcagcacatcagacagcgcaccttcatagcgcggataaaaacggacagaacttgccccggttttcagtgcgattctgaccgcatcatccagggttttattatcggaggcgctggtttcaatattaatatccagatgatagcgttttgctttctctgcaaaagcctcaagctgttcgtctgtcatggttgaaagagattgcgtttcaccatccagcacgtgaattttgacgcccggcaaatgatgttcgtttgcgatatcaagtaagtcacccggtaatattttttcaaaacgcatattcagatgataggcgtaggcatgcagatataacggtaatttatctgcacgttcaataatccggcgggcatcatcagtattcatgattcagattcctgtgtc

SEQ ID NO: 186 - DNA, 1440 bp, unknown
  Altogen 322075 strain
tagatatattcggccagaataccgatggcttcgccggtcaatgccggtgatatcttacccaattcactgtttttattggcatgacaaagcgtacgcatccacacctttcaaggtctagtgtcagattaagttgctcctaatacacattatgagcccacataatcatcattttcatttttccataatactgcgggcatttcataaaaatataaatttaaatcatcatcacattcatcattggctttttggggccaatttctctcaagaaaatcaataacttctttattatcaacattccaataaggaatttttgtacctaatgggtcatctggggagcaaaatttaatctcttgtttatccaataattctttgattactgaaaaaaatataaccttatgttcacaaaaagatttatctggattccaaccgacaacagaaccaaaaagacctgatagccatagccctcttgagtcattaacaatttcattaaaatgtataatatttttcataattgactcacttcaaaaattttatttctactggtgcaacatctttagctatacctctcggtacatcaattgtccaagccttgccagtttcacttgcagagttagaaaaatcacgtaaattaaagtttccattcggtgttttaacagtgtaaatattccctttccctggtactgccctcgcctctggtaaccctttattgcctgttaattcaataaaatattgcttaacttcagcttctgaagctccactaaagaccttcgcattacctttattaggcatttcaattaaagtcctgtttccaatttgtattcctgagcgcttgctatcatattcaaatagctctttaatttcattttttctatttgatgtttgaatctgttgttgcttaaacttttcctcatcttcaggctcccaaccactcggagtaccagaattactaccgcctaactcatttctctgttcgttcgttaaccctttacctatattaggggtactgcttttattatctgaagaccccttattttcagccaacattccatcatcccatggttttgtgccatacatgagatcatgttttcctattcggatttcttcattcaaccaatccctctgatcttttgataaattagcaatttcttcaggatttctgctaattcccgctttcattgcttcttcaatctgttcttttgttaagaggaaagtgactgataggcccaacgtgtgagtaacaccattacggcatcctggggtttgcgcacagagttttatcgcttccttacccgtcactgtagcacctttacttgccaccgagttattctcaaccgtcattttcccggcctgcgccgaattcgcagcactctgcgtgtcaccgcccaccagaccaccggcgaggccggatgccagggtagcccaggcgctgatattctcttt

SEQ ID NO: 187 - DNA, 1475 bp, unknown
  Altogen 322075 strain
tgcccgggagtgtgcagccgtccagactcaaccgttttacacagacgacaaaagtagacctgtaataatttccatctattagaaatcaagaaaagtcgatatctaaatgattataatcatctggattaaattctttttttatttttttgaaagctcctccgcaatttataaatcgcaattcactaacattatttttatttataaaaatctctgggttaataattttctttgaatttacaatataaatactcttaagtgattttatttcaaatagaacttcgcagtctatttcacactgtgcgccatttacaaaaatactctctatggttcttaattgttttatttttttaaactcaagattcttatcaacacctacaatagataaccgcttcaaatgctttggtacaatatcaaaaagaggatatttctttacatcctctacatgtatattttcaagtgaatgactctctgaaataccattaattaagtcaccttcatccatcaaaccaaaccatatagatttcaggtttttaaatctattgatatcaaaatcactgaattgattaatatatgaatcagcattaaaatttcgatgaaagaataattgctctaaacaaggtaaattttcaataactccccaattaattccagagtcataggtgcttcctgccaggccagttagcattagtaacttaatgctttttggcaaatcaccctcacaagcattattaagcatagacaatggaatattaaggcactctaattttagcatattcctaatactatctggcaatttatctcttgctgataataattgtctgactgttggaactaatctgagtttgactatattctcatctaaaatgatattattcttccaaggtagaacaattgcaccatcctcttcaaaatgagaacactcatctttatttccgacgcaataataatcctgcccactaaaatcatattcacttatcttcatttacacgtccttcttctttttccagctgatgccccatgttttttaattaaattctccgcatgtccttttttatctatagcctgtatacgctttgttttgtcattaagcatatttttcttgttagcaacttgcttatcatattctcgttgctcgaaatatcttaatatattatttctgtcactttcagttattgccttccctaaatctacaggaataaattgcacttttacacctttcctgcctaaaagcgcttgagcatttttatggttaatatcacctatccgcccattcatcccttgtttaccaatgcctgatgaacctacataggaatcatttcctgctgtaataatatatattcccggaatatcaggtaatgtagatggagcgctaatccaaccccacggatccacccacaccagcgcattcggcgcatactgatacagattcagcccaccggccagacctatcggatcatgctgggtaaaccggccgg

SEQ ID NO: 188 - DNA, 148170 bp, Unknown
  Altogen  635822 strain
  misc_feature (123931)..(123931): n is a, c, g, or t
  misc_feature (129551)..(129551): n is a, c, g, or t
gagagggttagggtgaggggtcacttcaaacgcgcaaagcctgcctcaagatcggcgatcaggtcgtcaatattctcaaaaccaatatgaacgcgcactaacgtgccggtaaagtccaccttggccgccggacgaatttcgttcagttcttccggctggttggccaggatcagcgattcaaatcccccccacgaataggccatgctgaagtgttcaaaatggtccagatagtgggcaacctgctcgttcgtcaaccgtgctttcagcacaaaagagaataacccgcagctaccgctgaaatcccgctggaagaactcatgccctttgcaagaaggcagcgccgggtggttgacccgctccacctctggccgtgctgccagccattcggcaatggcgatgctgctgatctcgtgctgcttgagacgcacacccagcgttctcagcccacggctgccgttataggcggtatccgcatcggccatttgccccatcaggtaggagttttcacgcagttggtcccagcaacgggcgttcgacaccgcggtacccagcatcgcgtctgaatggccgatgatatatttggttccggcctgaatagagatatccacgccataatccagtgccttgaacagaatgcccgccgcccaggtgttatcaatcatgatgacaatatctgggttcaccgcccgggcagctttcaccatcgccggtacgtcctggacttccatggtgatcgagcttggagattcaaggaacagcactttggtattgggctggatcagctcggcgatcccggcaccgatcagcgggtcgtaataggtggttgccacgcccagcttgctcaggattttgttgcagaaatcctgcgtcggctcataggcggctccggtcatcaggatatggtcgccactggcaacaaacgccaggatagcattggtgacagccgccgccccacaagggtaaagcgagcagcctaccccgccttccagctcggccatcgcatcctggaatgagaaatgcgtcagggtgccgcgacgtccgtagaataactcccctttggcacggttggcggtggcaaactttttggccttcaccgtatcgaaggttaaggaagaggcgcgttggatcaccgggttgaccgatccttgggtgaatcgaggcttacggccagcggtgaccagggcggtttctatttttttagatgtcataacaatttgcctgcttttatcgttaatcaggtgcgtagggctatgcagcaacccttacgcgattttttctgctatatccgtaatacctgcgttttcagagaccggctgcggctttttgcccgcaaagcgctcaacaatttgtgcggcattgagatcgtgtatgacgttgatcagcgtggccggggcgtcggttatggtgcccagaaccaccagcatcgggatggtttctaacggcagccccagcggggggacaatgaaaatctcacccaggaaagccccgccggggacgccacccacgataatcgccgacagcacggaaatcagcatcgtcaggaagaatgtctctatcgtgaaatccagccccagcaccgcgaaaataaacacgatcttcagggccgcaatcatcgccacgccgcccttattcaggtttaccagcagtggcagggagatgtccacgatttccggattgatccccatcgctttggcagcgcggatattggctggcaaggtgcccaaagaggaacaggtgcccagagcggtggccgaaggctcgatggcattacgccagaaggcacgtatcgcaggcatgccgccgccgatccacgagtaaaaaatggagccaaaaacgtagtacagcagcgttgcagcaaagaacagaccgatggctctggcaaaggtgactagcaactgtgagtcttggctggccatggtggaagcaaaatagcagcccagcccgatgggtgcccccttcatgatgatcgacacaatcttcatgatgatggtgttgagatcgttgagtgaattggacacccgcttgccctgctcacccgactggccgatagcgatgccggcaatcacggacatgataatcagcgccaggatgttggatttcgacagtagcccgacgaagtcgttggtggtcaccatgctgacaaaatccatacctccaccaccggcattaaacttctccgccagttcgatggtgaccccctgcgcggggttgaacagcgtggccaaaccgacgataccggccgcaggtatcagcgccatcacaatggaaacggcaaaaatcacccccatgatgcgcccgagctttttcaggtcggtcatgctggcgatcgaggacatgacgctgacactgaccaacggcacgataatcataaacagcaggttaaggaatatcttaccgattgcctgtaatttcaacgcaatatcgggcgcgtaaataccgactatccccccgagcgttaaggcaaatagcagaataaatgatgatttgtagggttctaaacgtttccacatattcaattccttatttttatcttttttgttcatgtgacttaagtcacttttttatttttctctacagtaatatgtgacttgtgtgagacaggtcaccccttggtgtttagttgtgatccggtacggtacagcgtattctgctattaataatggcatcttgttcgcagcgatgtaatagcgcattcgtaccgtttaatgaaatcactcgtgaattaaaggaaaaaatgagcagcccagcgtcgttaaagcaactggaagttctggtcaaaattgtggaatgcggtgggctgtcggaggctgccgcacacctgaacgtctcaccctcggcggtcagcaagagcttgtcacagctagaaagtcagttgggcaccaccttaatcaagagaaccacgcgcagctttacgctcaccgaacctggccaatacttatacaatcgtgcaacgcaactgttgctggactttaatgaatcgctcaacaccaccgccggttactataatcaccccaatggtgaattacggataacctgctctatggcttttggttattcccatttggcaacgttggcgaatcattttcgtgagcgttgccccgatgttgatttatatattaaccttaacgacaactttgttaaccttaatgaaactaactttgatatcgcattgcgcatttcttcggagccgcctattaattatgcaatgcgtaaattagccacggttaattgggcctattgcgccagcccgaaatatctcgagaattacggtacgccgcattccattcaggatttaccccatcatcagtgcctgatttatcctggcttgaccccggtatggaaaacccttgatgaacagggcgtcgcccaccacttgaagacacgtaccccgatccaggccaacagcagcctggtactgttgaaatcggtgctggaaaaccaaggcattgcctatctgcccacttatctgttgggcgatttgattgagcaaggtgccctggttccgctggcgctggacgataaactgactcacccgacccacggcctgtatgccctgtattttcccagccgctacagcaaccccaaggtgcgtgcctttatcgatttcctgctggagcaactacagccggtgcccatctgggatagttggttggcgcagtcttaaccgcgccatccctgcccggttaccgcaccgccactgcgcgcaacagcgtttccagcgggtataccgccgcaatcaccacttcatcccggatctgtgctgccgcgtccagctgttgctgggcctgttccgcctcggctttactcaaaggctttccttgctgataacgttccaatagcatcaagcccagatcggccagcgcgccgacatcctgcgccaccggagccaaatccttcatcaccacgttaccggctatcacctgcttcaccggtgcaccgttacgttgccagcgttgtagccgttcacggaccgcctccgccgccgcccgatggttcttgtctttaagcagcaacgccacttgcttatcgagatcgcgtaccgccgcactttctgggggaatggcatcagcaaagcggttaagtggctcaaattgatggtaattacctgccttgaacttcaggtgctgacgggtgtaatactgccccggctccaccgcttcggccaagatctgcaatggggtgatatctacgctgttagccaaacgggtaaactcacgcgccgtttcagcatgctgttgcaggccaacagacaccaccgaccaggcatctatcgctgccaggcgttggtacatattatcctcgttggtcacatccttggccgaccacatacgttccgccacggcaaaggttcttggccacagcttgagatcgagcaccggtgcgcgaatgttttccgcccagaaggcggcttcgccccccagaatattggcctgatgctgttcatccggcaccactggcatcacacccgccgggatcgccgtcaatttgctgccgctggttggatagcgcacgttgcccaccaacgtgtaaccgctcagttgatcctgctgcagagtaaataccggacgcgtgtcgcccatccaggtatcaatgcggaaggtcacctgttctggcgtacgccattcgatgtcccgcaccgcacggcgtgatttgtctttgaaatcgataaaaccacgccatccctgcttgccttcgatcagcgtaaaggtgccttccaccgggctccccttgaaacgcggcatgctgaactgccagctctgcgcctgctcccccgcctgcacgttggtatcaacccccagcggctgcggcaggatttcattgcgatagtgataggcggtgctgtgcggctgatcgagatagaaaccggtggaaagaatgccttgatagccatcctgggcgctggcccccaaagaatctggcccacgccaggattggatcacgatgttgtgcggcaaggtcggatggtaaatctcatcccaacccaccatacggcgttgatgcttttcgaggatcttttccaacttctggttgaagaaagcctgtagcgcatgggcatccaccagctggttctgctgcataaacgcctggatggttttggactctttccactgcgtagcgtctacctcatccccgccgatatgcaagtagggatccgggaaaatcgccaccagttcaccgatgatgctatcgacaaactgataaacctggtcgttcgaaggatcgagtgtaggcttgtggacgccccaatgacgttccatctgataaggccccggcccgctgagcagctctgggtaggcaacggcaatgctagatgcatggcccggcagatcgatttctggcaccacgcggataccccgcgccgtggcgtaggcgaccacctgcttcatctgttcacgggtgtagaaatgaccgtcactggccagttgctgtagctttggatagtgttcggaagcaaagcgccagccctgatcgtcggtcagatgccagtggaatacgttgagtttggccgccgccatgccatcaagctggcgcagaatatcctccaccggcaggaaatgacgcgccgaatccagcaacacgcctcgccaagggaaacgcggaacgtcggtaatgttcaccaacggcataaaggtattttcgccatcggtctgcaccagttgcagcagtgtttccataccgcgtaatgcaccgaagcgtgtgttggccgtcagcgtggcaccctgcggagtgatcttgagctggtagctttcatcgctgtccggtagcggctgggctgcaacctgatgtttgatgatgatgttgatcgttgccgcttggtttttctcgtcctgtggggccaacgtccagccggtttggcgttccaggcgatcgcgccagcgagcctgcgcttcgctcaagtcatcgccctgaacgttgaacgataagcggtaatccagcaccagcttgccctgcggctgagctaactcaacctgctgcggccagggcatcagcggcagatcgccagccggttgagccagcgcattgagggaaaagaatagagaagaagccagtagcgtataactgaagggtttgtgcatcggaaattcctcagaggaaaaaatcaatctagccaaggaagtagataaagactgagccggagggagatgtccaaccgcaggggcaaaacggtgcgatggatcacagattgatttggcggtgaggagatttcactcctcacctcaccatcagcaaatttactgccagccataccggcggacaaaccagcctttcacacactgggtcagcaccatgtagccagccaggatcagcaccagccatgggaagtagctcagcggcaacgcctgcaactgcaggaagcccgccagcggcgagaaggtcaggccgataccgacggcgatcaccgccaacgtcatcacgcacagcggccaagatgggcggctctggataaacggaattttgcgcgtacggatcatatggacgatcagcgtctgcgacaacagcccttccacaaaccagccggactggaacagcgtctgcatttccggcgtattagccttgaacacgtaccacatcaggcagaaggtcagcacatcgaagatcgagctgatcggcccgaagaacaccataaagcgccccagatcgccggagttccaacgctgtggcttggtgatctgatcgtcatcaacgttgtcgaacggaatggcaatctgtgaaatatcgtacagcaggttctggatcaacagatgcagcggcaacatcggcaggaaaggtaaaaaggcgctggcgatcagcacgctaaagacgttaccgaagttggagctggccgtcatcttgatgtatttcagcatgttggcaaacgtacggcggccttcaatgaccccctgttccagcaccagcaggcttttttccaacaggatgatatccgccgcttccttggcgatatccaccgcagaatcgaccgaaataccaatatccgccgcgcgcagcgccggggcatcgttgataccgtcgcccataaagcccaccacgtggccctgcttacgcagcagttgaacgatgcgttctttgtgcagcggcgtcagcttggcaaacaccgtggtacgcgccgccgcggcgaccagtgtggcatcatccatcagttcgatctcgctgccacgcaggatatgctccgcatccagccccacgtccttacacaccttggcggcgaccagctcgttgtcaccggtgaggattttgacggttacgccattctttttcagcgcggccaatgccggtgcggtgctctccttcggtggatcgaggaaggcgatataaccttcgaggatcagatccgactcatccgctacgccatactcatgatccgtcgctggcaggatcttgttggccaccgccaccacgcgcagcccttgctggttgagctcgtcggtcacacggcggatgcgcgccagcagcgcttcgctgagtgggatcacctcatcttcctgccgcacgtggctacagatcgacagcatctcttccagtgcgcccttgcagatcagctcgtggtactgcgcctctttcgctactaccaccgacatgcggcggcgttcgaaatcgaacgggatctcgtccactttgcggtaatgctgcaacacgtccggctgttggctttcgtcggcacaggtcagcaccgccacatccagcaggtttttcaacccggtctggtagaagctgttcagccaggcatagcgcagcacccgatcactgttggcgccaaacacgtcggtatggcgttccagcacaattttgtcttgggtcagcgtgccggttttatcggtgcacagaatatccatcgcgccaaagttctggatcgcatccagacgtttgacgatcactttctgccgtgacagcttgactgcacctttcgccagggttgaggtgacgatcatcggcagcatttccggcgtcagccccaccgcgactgagagcgcaaacagcgccgcttcccaccaatcgcctttggtgtagccgttaatcagcagcacgatcggcgtcatcaccaacataaagcgtatcagcagccagctcactttgctgataccggcctggaaggcgttgggctgctcatccaggctggtcacccgctgcgccaactggccgaagtaggtttcgctaccggtgccgatcaccatggccagcgcagtgccgctgacgacgttggtccccatgaagcacaggttttggcactccaacggatcgctcacctgatcgcggagatcggccactttttctaccggcagcgactcaccggtcagtgccgcctggctgataaacagatctttggcagacagcaaccgcagatccgccgggatcatatccccagccgacagcttgataatatcgcccggcaccagctgcgagatcggcagttcactgtgctcgcttttaccggtatgtgcatcgctgcggtataccgttgcggtgttgctgaccatcgccttcagcgcatccgccgccttgttggagcgggcttcctgaataaagtgcagcagcgtggagatcagcaccatcaagccgatcaccagcgcgccgatcagatcctcggtggcgtacgaaatcagccccagcacggtaagcagcaggttgaacgggttgcggtagcaatgccacagatgcttccaccagctttcagcctgctggttttcaatcgtgttactgccaaactggctgcgggcggtttctgcttcctgctcggtgatgccttccgggtggctgttaaaacgctcatacagttgcatagagctggcggcggcacattccaggcgttgttgcgtcaaactgacaggcagctcatgcgctacaccgctgacgctttccaacaaagcatcgcgccgaatcaaacggcgtggcaaattgcggctgagcagacccagcagctgacgggggatatgtttaaatttcatcgttcgcacctcgtcgcccagcgcctcacggcaatgggtgaacggcggatcggcccgctggcacgattttcagacacgccaaaaatcatccgccggagcagatcactgattttcaatcacaacagaggcgaactatcgagcaagtgccgctgcttacctaaaccggcaaaacagcaacgcagagcggagaggttttaccgggaaaccgaatgagtagtgtcggggctcggatcaggatccattcagggattaacctcaggtctaagaaaaagtggggacggcagttgcggccattccgctacgcatcactataggctatgcaccgagatccgcgcgataaaatgcgctatggtggcgagcataagtgggatgttgtaagtttaagcctcataacctaaacgataagtaaaccatgcaaaaccggctgacaatcaaggatatcgcccgcctgagcggggtaggcaagtctaccgtctcacgcgtgatgaataacgaaggcagcgtaagcccgcaaacccgtgaacgggtcgaagcggtgatccgcagccagggttttaccccgtcaaaatcggcgcgcgccatgcgtggccagagcgataaagtggtcgccattatcgtttcccgtctggattccccttcggaaaatcaggccgtgcgcaccatgctgccgctgctgtatcagcaggggttcgatccgatcgtgatggaaagccagtttgaaacccggctggtggaggaacacctcaacgtactgcgtcagcgtaacgtcgacggcgtgatcctgttcggctttacaggtctgactgccgacatgctcaagccgtggcaggaaaagatggtggtggtcgcccgcgaatatccggggatctcctcggtttgttatgacgatgaaggtgccgtgcagttgctgatgcagcgcttacgcaagcagggccacagccatatcagctaccttggcgtgcaggagtccgatgccaccaccgggatgcgtcgccatcaggcctatctggatacctgccgcgagcagaaaatctcgccgctggtggctctgggagaactgagctaccagagtggtttccaacaggccgccaacgtgattgaaccgcaaaccaccgcgttggtctgcgcctccgatactatcgcactaggcgcgatgaaatacctgcaacagcaacaaattacgccaatccaggtgtgcgccatcggtaacacgccgatgctcaacttcttgttcccagagacgttttccgttgaattgggttatggcactgctgggcagcaagcggcccttcaactgctgggccagttgagtggtgaactgagcatccgccaaatcattatcccctgcaaacttgcctgacgggcaagctcacttctgaacggggcagcgtacggctgccccgtgttgtagccggagttcattgtgacgcgacttgaggctttattgttcgttttgtgatccttaccgcaagttgggaacgttcccatttaataaaaacggcctagtggctaagcttaaaaacatcaatacctctaagcctcactgataacaaaggtgccataatgagcaaagttcagcagcaggacatcgatcgcctgatcgtgctggtgggtggccgcgagaatatcgccaccgtcagccactgcattacccgcctgcgtttcgttcttaacgatcccgccaaggccaagccgaaagagattgagcagttgcgcatggtcaaaggctgcttcaccaacgccgggcagttccaggtggtgatcggccccgaagtcggtgattactatcaggcgttaatcgctgccactggcatcaacgaagctgataaagaacaggccaaactggccgcccgccagaacatgacctggttcgaacgcggcatctcccacttcgccgagatcttcttcccgctgctgccagccctgatcagcggcggtttgatcctgggtttccgcaacgtgatcggcgatatcccgatgtccggcggccaaacgctggctcagatgcaccctgcctggaaaaccatttacgacttcctgtggctactgggcgaagccatctttatgttcctgccggtggccatctgttggtcaacggtgaagaagatgggcggtaccccggtgcttggcatcgtgatggggatcaccctggtctctccccaactgatgaactcctacctgctcggccagcaagtgccggaagtatggaactttggttggttcaccattgagaaagtgggctatcaggcgcaggtgatcccgtcgatcctcgccggtatggcgctgggctggatcgaaacccgtctgaaaaagatcgtgccggattatctatatctggtggtggtgccggtggtttctctgctgctggccgtgttcttggcacacacgctgatcggtccgtttggccgcatgatcggtgatggcgtagcctgggcggtgaagtgggtaatgaccggcagttttgccccgatcggcgcggcactgtttggcttcctgtatgcaccgttggtgatcaccggggtgcatcagaccacgctggcgatcgatatgcagatgatccaaagcatgggtggcacgccagtctggccactgattgccctgtccaatattgcgcaggcctcggcggtgctgggcatcatcatcgttagccgcaaggccaacgaacgtgagatttccgtaccggccgccatctccgcctacctcggcgtgaccgaaccggccatgtacggtatcaacctgaaataccgttttcccatgctgtgcgcgatgatcggctccgccttcgcaggcttgatttgtggcctgaccggcgtgatggctaacggcatcggcgtgggtggcctgccgggcatcctgtctatccaaccgcagttctggctgatctactcggtagccatcctggtggccgtggtgatcccgctgctgctgaccatgatggtttacaaacgcaaagccagccgcggcgagttaccggtttaaactgaaaggtacttttttatgagcaatgtaattccctggtggcagaacggcgttatttatcaaatctatccgaagagcttccaggacagcaccggtaacggctatggcgatctggccggggtgacccaacggctggactatttgcaggagctgggtgtcgatgccatttggctaacgccggtctatgtctcaccccaggtcgataatggctacgacgtcgccgattactgcgccatcgatccggcttacggcaccatggccgacttcgaacacctggtggcgcgggccccccagcgcagtatccgtatcgtgatggatatggtgtttaaccacacctccaccgagcacccgtggtttaaggccgcgcaggatcctgccagcccactacgccagttctacatctggcgcgatggcgaaggtgatgccctacccaacaactggcgttccaagtttggcggcaacgcctggcaatggcacgccgacagcggccaatactacctgcacctgtttgctaccgagcaggccgacctgaactgggaacacccgccggtgcgcgaagagctgaagaaagtgtgccagttctgggcagataaaggcgtggatgggctacgccttgacgtaatcaacctggtctccaagcagcaggacttcccaagcgatagccagggcgatggccgccgtttctacaccgacggcccgcgcattcacgagtttttgcaggagatgagccgcgacgtgttccagccacgcggcctgatgaccgtgggcgagatgtcttcaacttccctggagcactgccaacagtatgcggcgcaaagcggtgccgaactgtcgatgaccttcaacttccaccacctgaaagtcgactatgccaacgggcagaaatggacgttggccgcgccggattacgtcgaactgaagcagattttccaccactggcagcaaggcatgcataaccgcgcctggaacgcgctgttctggtgtaatcacgaccagccgcgcatcgtttcgcgctttggcgacgagggcgagctgcgagtaacctctgccaagatgctggcgatggtgctgcacggtatgcagggcacgccgtatatctatcagggtgaagagatcggcatgaccaatccgggcttccagcagatcgaaagctatcgcgatgtggaaagcctgaatatgtacgccgaactgcaggctcagggaagaaacgaagacgaactgttggctattctggccagcaaatcacgggacaatggtcgtacgccgatgcagtgggacgcaacaacccacgctggcttcaccaccggtacgccttggatcgcctgtgcagagaactacccgcagattaatgccacggcggcattggccgatcgggattcggtgttttacgcttatcgccatctgatcgccctgcgcaagcagtatccgttgctgactcacggtgactatcaggatctggccccggctcacccggcattgtggtgttatcaacgtagctggaatggacaacggttgctggtcgttgcgaacctgagccgcgaaccgttggcatgggatgccgctggcgttgaattttctgaactgtggcgcccactgataagcaactacatggatgctgcagagcagccacgggccggagttttgcggcctttcgaggcgagttggtggctgctggagtcctgattggtcaccgggagttgtttgctacaatccatacataattgttttaaaaacaatgattttgtatggttaaaacaatgaaattggcgctgggaatacttcctctgttactcagcgcctgccagcaagcgccaggcaggggccaaaacacagcggatctcaccgcgacgctctgccgttgaatcatatatttaacaccaagtaactgacctttattattccccgtataaataagtcacccagtacaattattcttgctttcacttaacttccttaaatttcttcctgaatcattactacgctatttcagacacaaaaagatctgcatccaagatcaaaatgtgaaggatatcccaaatcgtaaatagatttatttcacgctgtaaaaaaaacatgcaataataggaaaaaattaggttaaaaaataaccacataataaatataacaattttaattaaatcaccagactgattttttccatctgcctttttacctctcgtgaaatggagcacttttatgaccatcaaaaggaagtcgatatttatagtcagtggtttattcgccgccggattgaccggctgtgacaataatgacaccaagattactccgagcaatcaggcggagctggagagcagaaatattcccacgcttaccgtcgacgggctgaaatttaaagatctgaataaaaacggccagctggacccttatgaagactggcgtcttgatagcgccacccgcgcccgcgacctgaccgcccgcatgaacgtggaagaaaaagccggtgccatgatgcacggcaccatcggcctcaatggtgctggccgcgtcgatatcagcgccgccgaagaagatgttaaccagcgcttcgtcaacaccttcattacccgtatggcgggcgatccacagcatatatccgccgataacaatgcgctgcaggaaatggccgagaagtctcgcctcggtatcccggtgaccatcagtaccgacccgcgcaaccacttcgttaacgatcctaatgccaccagtgtcgcggcaggcagcttctcacaatggccagaaccgctcggcctggcggcaatcgatgatacggcactgtccaaaacctttggtgatattgcccgtcaggagtaccgggccgttggcatccatatggcgttatcaccgcaggctgaccttgccaccgaaccgcgctggggccgtatcaacggtaccttcggcgaggataaccaactcgccaaacgccaggtgcaagcttatatcgaaggcttccagcatggtgataaaggcttgacccaagacagcgtcatcaccgtggtaaaacactttgccggtggcggtccacagcttggcgggttggatccacacaacatctttggcaaagagcaggtttacccaggcgagaatctggaataccacctggtaccgttcgaaggggcgtttgccgccaatgtggcctcggtgatgccctattacggccaaccgatcaacctgtggtacaaggatcagctgattgaagaagtgggttttggctttaataagcaggtgttgaccgagatgctgcgtggccgctttggtttcaccggtgtagtgctgagtgactggggcatcctggaaagctgcgaaggtaaatgcgccaccggtatcagcgatgccgacatcgccgccggagtctcgccttgggctgccgggatcggcatgtcgtggggcgttgagaacctcacccgccaggaacgtgtagtgaaagcggtagaagccgggatcgatcagttcggtggtaccagcgatcccagcgatctgatagaagccatcaaccagcaacagctgccgatcgccaccatcgacgcttccgtcacacgtattttgcagcaaaagtttgagctagggctgtttgagaaaccttacgtggacgaagccaaagcggtgaaaattgtcggtaacgcggagttccagcagaaaggggatgatgcacagcgccgtgcgcagatcctgttgcagaataataattccctgttgccattggcgctgagcggcaagaaggtgttcctgcataacgtcaacgctaccgtggcggcacgctatgggttggaagtcgtcgctacgccggaggaggcggagatcgccatcctgcgagtagatacaccgcatcagaacgatccgcactacccgtttggcgtttcggtcaacttcggccaactgggctttgacgatgccgataccgtggttctggatcagaaagctggcacttacagcggcagtgaagactatcagttgatcaaacaggtgaaggcgctcaacattccaacggtgatttccgtttacctcgatcgcccggcgatcctgaccaacatcgtggataaaaccgacgtattgctggccaacttcggcgcatccgatgaggcggtgctggatgtgatcaccggcaagagcaaggctcagggtaagttaccgtttgagctgccatccagttggcaggcggtgctagatcagaaagaggacgtgccgcacgattcggtcgatccgctgttcccaatcggcgcaggtattctgtaatacggccccccaccccaaccccctcccaaagggagagggagtagcccgagctcggttgccacacttaccatcgagcagcaaacttcggtgttaagtgttcacgatgtccccgaacttaaaaactctgtaccagtttcactaccttcgtcgcttcctgtgccaacacttcatcactcatatcaaatacgccctgcaccaggtgtggcggcaggtaatccctgccggtcaggttagcgacggcgttaaatggccgcagcaggtcggccaccggatagcggttataccctgccggtgaataggcctgcgcattgcccccggtgctgaccaccagttgcaaaggcttaccttgcagttgggtaccttcgctgccataggcgaaaccgtgggttaataccgcatcctgccattcgctgaggatcgccggtgagctgtaccaatagaacggaaacagcatcaccaccacatcgtgcgcctgcaacagttcctgctcgcgggccacatcaatctggtagtcagggtaaacgcgcatcagttcatgcacggtgacgttaggtaaaggacgcagcgcctcgatcagcgccttattgatacgggaatcgtcagggaaacggtgagcggccaacactaaaatacgcgacatggggaaatccttgtgtatcgaaagtaagccattttttcatttcctgcgtttccggtgtagtctgtaaacagtcacattaacttcaacctaaagtatcaaccactatgtcgctgccgattgacgtgcaccgcctgttaccggcgtttctcagcgccgctcaaacacaaaacttctccgccgctgcacgccagctgggcgtgaccccggcagcgatcagcaaaaatatccgcgtgctggaagagaagctggcgctgcggctgttccaacgcaacacccacagcgtggtactgactgacgaaggcaaagccctgctggagcaggtggcaccgctatggcaagcgctgaccgccacgctggagctggccgggggggcacaactccctcctgccggtagcgttcgcgtcagcatgatcccaggctttggccgccaggtactgatgccgctgatccctgagtttttacaacgctacccgatgatcgatctggatctgtcgctggatgcccgggtggtgaatctcgtcggtgaaggttttgatgtgggcatcggcagccaggtcgatcccgatagccggctggtggcacgcccgctctacccgatgcagatgctattggtcgccgcccctggttaccttgcccaacatggcacaccgcaggcgccggaagatctgctgcaacatagctgcctgctgcaccgcaatcctgccaccgggcgaaatgtaaaatggccactggcacacaaaacgctggatctgcatggccgcctgactgccagcagcccggagatgttgctagattccgcgctggccgggctgggcatagcttgcctgtcgcgctggtatgtggaacaacattttgccctaggaaccttactgccagtgctgcaagatcactggccaaaacccacgcaaatctggctctactatgcctcggcagatttgccaccacgggtgcgcgtctgggtcgattttttactggcgcattttcgccgctaatcggcatgatgcgatcgcaatcacgctttaacgatctttcggataatcggcattttccattcaagccgctgatagcaagggttataaatattcctgtaacgggtaactgtacagggttcaaactgctccccccattctttgacccacgtcaaaaaaagcggcaccacacccatatatagtgcccatagagattcaatcaactatatgtagtagttatccacaatatcatccacaccctccgcagcccttgcgccctgcggttttgccctgtggataagccgacgctcccccatggggacaggagttacaacgtgaaaccagtagtgattaaacgggacggttgccaggtatcttttgacgagatgctgatcaagcaggccatcgagcgggccgctttggccgctgacgttgtcgatgccgactactgtgctaccgtcgcccgcgtggtcgctcaacagatggaaaaccgaccgcgtgtcgacatccacgaaatccagcaggcggtagaaaaccagctgatgtctggcccgtataagcaactggcacgtacctacatcgaatatcgccacgatcgtgacgtctcgcgtgagctgcgcggacggttgaatcaggaaattcgtggtctggtggaacaaagcaacgtcgcgctgctcaatgagaacgccaataaagacagcaaggggatcccgacccagcgcgatctgctggccggtatcgttgccaagcactacgccaaacagcatatcctgccgcgcgacgtggtgttggcgcatgagcgcggcgaaatccactatcacgatctcgactactcaccgttcttcccgatgttcaactgtatgctgatcgatctgaaaggcatgctgaccaacggcttcaagatgggtaacgccgagatcgagccgccgaagtcgatctccaccgccactgccgtgaccgcgcaaatcatcgcccaggtcgccagccacatttatggcggcaccaccattaaccgaatcgatgagatcctggcccccttcgttaccgagagcttccacaagcatcagcaggtagcgcagcagtggcagatcccggacgtggctggctatgcgatgacccgcaccgagaaagagtgctacgacgccttccagtctctggaatacgaagtcaataccctgcacaccgccaacggccagacgccgtttgtcaccttcggtttcggcctgggcaccagttgggaatcgcgcatgatccagcagtcgatcctgaaaaatcgcatcgccgggctgggtaaaaaccgtaaaaccgccgtgttcccgaaactggtcttcgctatccgcgacggcctgaatcacaaatttggtgacgccaactacgacatcaaacagctggcgttggaatgtgccagcaaacgcatgtatccggacattctcaattacgatcaggtggtcaaggtcaccggttcgtttaaaacgccgatgggttgccgcagcttccttggcacctatgaagagaacggcgagcaaatccacgatggccgcaacaatatcggcgtgatcagcctgaacctgccgcgtattgctctggaagctcagggtaacgaagagcgcttctggcagttgctggatgagcgtctactgctggccaagaaagccctgatgacccgcattgcccgcctggaaggcatcaaggcccgcgtggcaccgatcctgtatatggaaggagcctgcggcgtaaggttgaaggccgacgacaatatcgcggagatcttcaagaacggccgcgcctcgatttcgctgggctacatcggcgtgcatgaaaccatcaatgcactgtttggcgcagaaaaacacgtgtacgacgacgagcaactgcgcgccaaagctatcgccatcgttgagcgcctgaaaaacgccaccgaaagctggaaagaagaaaccggctacggtttcagcctgtacagcacgccaagtgagaacctgtgcgatcgcttctgccgcctggataccagcgagtttggcgtagtcgctggggtgacagacaaaggttattacaccaacagtttccacctcgacgtggagaaaaaggttaacccgtacgacaagctggacttcgaggcaccgtatccacctttggccaacggcggtttcatctgttacggcgaatacccgaacctgcagcacaacctgaaggcgctggaagacgtgtgggattacagctacacccgcgtgccttattacggcaccaacacgccgatcgatgaatgctacgagtgtggctacaccggtgagttctcctgcaccagcaagggcttcacctgcccgaaatgtggcaaccatgattcggcaaaagtgtcggtgacccgccgcgtgtgtggttatctgggcagcccggatgcccggccgttcaacgccggtaagcaggaagaggtgaaacgccgggtgaaacacctgggcaatgggcagatcggctaactatcgcgaatgacccctcaccctaaccctctcccacagggagaggggaccgaatgtgccactcttaacgacagcattcatcctcaacatagtctagctacagagtaacttctgcacctgagcacaacgccgggctagttccctcttactaaaggagaggcttgagatgagtggatgtgtcacaggtgacttccatacctgaccaccgcaccgggccagctccctctccccgcgggagagggttggggtgaggggcaatataaaagaacgcaatactatgaattttcaccagtattatcctatcgacgtggtcaacggccccggcacccgctgcacgctgtttgtcgcaggctgcgtgcaccaatgccccggttgctataacaaaagcacctggcggttgaactccggcctgccgtttacccagcagatggaagaccaaatcatttccgatctcaacgacacgcgtattccacgccaagggttgtcgctgtccggtggcgatccgctgcacccggccaacgtcgccgccgtattgcagttggtcaagcgagtacacgccgaatgccccggcaaagatatctggctgtggaccggttataagctggatgaactggatagcgagcagatgcagatcgtcgatcggattaacgtgttgatagacggcaagtttgtgcaggatttaaaagacccggcgctgatctggcgcggtagcgctaatcaagtggtgcataagctgcgttagtttgtccggtttggtgcagcgtacgctgcgccccttcttccctttcaaaatatcaccccgtcctatcctcccacaccatcatctgcctgtcccaaatagttcatcagttcgccacctgcacgtcacctgattgtcatctgcccccggcaacattagcccaactttgttaccgagtgccgatcatgaatgctatcgccgctttttcgctttctcccccaaccgaagtgccgaggtattagctatgacgcacttatctagacatccgaccagttatcccacccgatatcagcagatcgccgcccagctggagcaggagctgtgcagccaatatcgctgtggagattacctgccatcagaacaacagcttgccgagcgttttgaggtcaatcgccacacgctgcgtcgcgccgtagacgagctggtagagcgcggttggctgcagcgccgccacggcatcggcattctggtgctgctacgcccgtataactatccgctgcacgccaatacccgcttcagccagaacctgttcgagcagggcagccaccccaccagtgagcgcttacttgctgttttacgcccgtgcaatgggcatatcgccagcgcgctcaaccgtgaagagggggaaaccattatccatctgcgcaccctgcgccgggtgaacggcgttcctctcagcgtgatcgaccactatctgcccgatctggactggtggcccgccttacaacagttccacagcggttcgctgcatgagtttatccaacagcagatccaccagccgctgacccgccgccaaacccgcatcagcgcacgacgagcccaggctaaagagagccgcctgctggagatcgccacccatgcccccttgctatgcgtgcgcaccctaaatacctgtatcggcagcgatttggtggcggaatactccgtcagcctggcgcgcgccgacatgatcgaactgacgatggagcactgaatgcaatccttacagcagagacaacgctggatgtcggtcctggcgcatagccaacccgcccagttgcgcagccactggcaggcgctgaacctcaacccaagctaccagcgcctgcgcgcccctgagattggcctgacacagctgctaggacggatgggagcgaccggccgccgctttgtgttgggcgatatgaccgtaacccgcgccgtggtgcagttggaaaacggtgcccaaggctacagctacgtaaccgggcgtgacaaagagcatgccgaactctgtgcgctgatcgacgccttgctacaacaacccgccaaccatgaattgctacagcttcaactgatcgagcccctggccgcactgcaacaggagcagcgccaactgcgcgcccgtgccgtagctgccagccgggtagacttctttacgctggtgcgaggggattaaaccatgacgttattagccggctttgacctgccgattgagcaatcccagtctgctttccgtttgattttaaaggcgttgagtgaacctggcgtgattgttgaactgcctggttgcccgacatggggtgcgctgaacgccgccagcaccgccgtgatactgacgctggcggatcaggaaaccccgcttcagctctgctccacactaaatagtgagcaagtgctaactaacattcgttttcataccggtgctccgctggctacccggcaggaagatatccatctggcggtatgggatgaccagttacggcctgccgaactaagcgctttaccccacggcagtgaagtctcaccggagttcggtgccacgttggtagtgcaaattgccgcattggcaggcagccacacactgcgcctttccggccccggcattgaaaaacaacgggaaatctccccgctgttgccagctgcactacgggcttatctactcgaacggcctcagcgcttcccgctgggcctggacattatcttgacctgcggtgagcgcctgatggcgctaccaagaaccacccgcgtggaggagtgctgatgtacgttgcggtgaaagggggcgaaaaggccatcgaggctgcccatcaacttcaggaaaatctgcgccggggtgacgaaactgtcccagcgctcagtgctgagcaaatcggtgaacaacttggcctggcggttgaccgggtaatgacagagggcggtatttacgatcgccaactggctgcactggccatcaaacaggccagcggcgatctggtagaggctattttcctactgcgcgcctatcgtaccaccctgccgcgcctggccgtcagcgaaccgctggctagcgagaacatgcggcttgagcggcgcatctcagcggtttacaaagacttgcctggcggccaggtgctcggcccgacctacgactatacccaccgcctgctggattttgcgctgttggccaacggtgaaacacctccggcaccacaggccgatgagccgctaccagagagctgcgcccacgtgttcgacctgcttaatcagcaacggttggcgctggcagaagaagatgacggcagcactccggacgatattacccgcaacccgccggtctatccctgctcccgctcggcgcgcttacagcaactggtgcgtggcgatgagggctttctgttggcactgagctactccacccagcgcggctatggccgtaaccatccgtttgctggagagatccgcagcggttacgttaccgtggagatcgtgccggaagagttgggtttcgccgtcgatatcggcgagatcctgctgactgagtgcgagatggtgaacggttttgtcgacccgcaggaccggccaccgcacttcacccgtggctatgggctggtatttggccgctcggaacgtaaagccatggcgatggcgctggtggatcgcgccctgcaaaccgccgagtacggcgaagacgttgcgggcccggcgcaggacgaagagtttgtgctggcgcatgccgataacgtggaggccgccggttttgtctcccacctcaagctgccgcactacgtcgatttccaggctgaactggagctgctcaaacgcctgcagcaggaatttgccgctcttcaggagaatcgccatgagtgaagtattgaccggctataacctcggttatctggatgaacaaaccaagcgcatgatccgccgcgccatcctcaaggcggtggcgatccccggttatcaggtgccgtttggtggccgtgagatgccgatgccttatggttggggcaccggtggcatccagatcaccgccagcatcattggccgcgccgacgtgctaaaggttatcgaccagggtgccgacgacaccaccaacgcagtctctatccgccgtttcttccagcgcgtagccggggttgctaccaccgagcgcacgccagaagctacgctgatccagacccgccaccgtattccggaaacgcccttacaggcggatcaaatcctgatttatcaggtgcccatccccgagccactgcgctttatcgaaccgcgtgagaccgagacgcgcaagatgcacgcgctggaagagtacggtgtgatgcaggtgaagctgtatgaagatatcgcccgctacggccatatcgccaccacctatgcctatccggtgaaggttaacgatcgctatgtgatggacccttcgccgatcccaaaattcgataacccgaagatgcacatgatgcccgcattgcagttgttcggggccgggcgcgaaaaacgcatttacgccctgccgccgtttaccaaggtggaaagcctggactttgacgaccatccgttcagcgtgcagcagtgggaagaaccttgcgctctatgcggttcgcgccacagctatctggatgaggtggtgctcgacgaccagggcagccgaatgttcgtctgctcagacaccgatttctgccagcaacaactcaaccaagaggtatcgcactgatgacttccgctccattgagtgccacgccgttgctgacggtcgacaacctcacccacctttacgcgccgggcaagggtttcagcaacgtgtcattcgatatttatcccggtgaagtgctgggcatcgtcggcgaatccggctcgggtaaaaccacgctgctcaagtcgatctccgcccggctggccccgcaacaggggcagatactttaccgcccacaaccgggacaacagcaggatctgtacgcgatggcagaaagcgatcgccgccgcctgctgcgcaccgactggggagtggtccatcagcatccgctcgatggtctgcggccacaggtgtctgccggtggcaacatcggtgagcgcctgatggcgatcggccagcgccattacggtgatattcgccagcaggccaaacagtggctgggagacgtggagatcccggtttctcgtctggatgatctgcccaccaccttctccggcggtatgcagcagcgcttgcagatcgcccgcaatctggtgacccaccccaagctggtgtttatggatgagccgaccggcgggctggacgtttccgtgcaggcgcgcctgctggatctgctgcgcaatctggtggtggaaatgcagctggcggcggtgatcgtcactcacgatctgggggtagcacgcctgctggcccaccgtttgctggtgatgaaggaaggtgaagtggtggaaagcggtctgaccgatcgggtgctggacgacccgcaccatccgtacacccaactgctggtctcttcggttctgtcgtaacgtaggtgagataatgacaattaaaatccgggttgaacacctgagtaaaacctttgtcctgcaccaacagcacggcacccgcctgccggttttgcaggatgccaacctgaccgtcaacagcggcgaatgcgtggtgctgcatggccactctggcagcgggaaatccaccctgctgcgctcgctgtatgccaactatctgccagacagcggcaaaatctggatccatcaccaaaacgactggctggagctggttcaggccgaggctcgtcagatcctgtcggtgcgccgccacaccataggatgggtcagccagtttctacgggtgataccccgcatcagcgcgctggaagtggtgatgcagccgctgctggaatccggcgttgagcgtagcgaatgccgtgaacgcgccgaagccctactcagccagctcaacgtgccacagcgcctctggcaattggccccttcgaccttctccggtggtgagcaacagcgggtgaatatcgcccgtggctttatcaaggattaccccatcctgctgcttgacgagcctaccgcctccctcgacagccgcaacagcgcggcggtggtgaacctgatcgaacaggccaaacagcgtggcgcagccatcgtcggtattttccacgacgaaggcacccgtcagcaggtggcagaccgtttacataccatgcaggccccacaggttctggagacgccatgattatcaataacgtcaagctggtgctggaacaccagatcgttgcaggttcactggaaatgaccgatggcgtgatccgcagctttgccgataccccaagccagctaccgcaggcgctggatggtgaaggcggctggttgctgcctgggttgattgaactgcataccgacaatctggacaagtttttcactccgcgccccaacgtggactggccagcgcattcggccatgagcagccacgacgcgctgatggtcgccaacggcatcaccacggtgctggatgcggtggcgatcggtgacgtgcgcgacggtgggcaccggctggaaaacctgcaaaaaatgatcgacgcggtgatctacagccagcgagccggagtgaaccgggccgaacaccggctccacctgcgctgcgagctgccccatagcagcaccctgccactgttcgaacagctgatggataaaccgggcgtgtccttggtgtcgctgatggaccattcgccaggccagcgacagttcgcttcccgtgagaaataccgtgaatactaccagggaaaatatcacctcaatgaccagcagatgagcgagtttgaggtagagcagatcggtctgtccgaacgctgggccacaccgaaccgcgaggcgatcgccgcccactgccgggcacgcaatatcgccctggccagccacgacgacgccaccgccgaacacgtcagcgaatccagtgcgctaggcagtgtgattgccgaattcccgaccaccgaagcggcagcccgggcttcacatcagcaaggtttgcaggtgctgatgggcgcgccgaatatcgtgcgcgggggctcacactccggcaacgttgcggcacatcatctagcggcccttggcgtgctggatatcctctcttccgattattaccctgccagcctgttggatgcggcgtttcgtctggcaaacgacgatcgcaacgcgttcagcctgccgcaggcggtacaactgatcacccgcaaccctgcacgggcgttgggcttgaaggatcgtggcctgatcgccgaggggttgcgcgccgatctggtattagccaggccgcacggcgagcatatctacgtgcaaaacgtctggcgacagggcaagcaggtgttctgatggcctatctcatctacctgatgggcccgtccggagcaggcaaggacagcctgctcgaacggttacgggccgccaccggtgccgggccgctggtggcgcaccgttacatcacccgcccggccaatgctggctgcgagaaccatatcgccctgagcgaacaggagtttctgcgccgccgcgccaaaggattattcgccctggactggcaggcgcacgaacaccattacgcctttggtatcgaggtcgatctgtggttattgcaagggatcgacgtggtggtcaacggatcccgcgctcatctgccacaggcgctacaacgctacggtgcccaactgctgccggtctgcctacaggtatccccaccggtgttgcgtaaaaggctggaacagcgcgggcgggaaaacgcgatacagatcgagcaacggctcgcacgggcggctgactatcagcagaccctaccgattggctgccacctgctggataacaatggcgatctcggacataccctcgacgcattgctggccttaaccgaaaaacaaccacaggacactctgtcatgaggtgagcagtcaagtttgagcacagtgacgcccctcaccctagccctctcccaaaaggagaggggacagaacgtgccacaaattaacttccgaacctgtcttcagctccgtatcggttgggattgatggagagctcaatgcaccaaaacggcaccgtaccagctccttctccctttgggggaggggagatccataccgtcaataagaggaaaccaacatgcaactgacctttcttggtaccggcggggcacaacaggtgcccgcctttggctgcgaatgcctggtgtgccaacgggcgcggcgtgaaccggcatttcggcggcgaccgtgcagtgcgatgatcaaatttgaaggggaaacgacgttgttggacgcgggattgggctcgttggaaaggcgttttgcggcgggggaaattcaacgttttttactgacacattaccacatggatcacgttcaggggttatttcctttgcgctgggggtgtggaaatgcgatcccgatctatggcccggcagatgaacagggctgtgacgacttgttcaaacaccccggtattctggcattccaacccccgctacatccctttgaaacggttgaactaggcgggctaaatgtcacgccgttgccgttaatccactccaaactcacccacggctatctgatccaggcggcaggcaaaaccctggcatacctgaccgacaccgtcggcctgccgccagaaaccacacgctacctgcaacaggtcactctcgatttactggtgttggattgcagcctgccgccgcagccacagacaccgcgtaatcacaacgatctgccccgtgcgcaggagatccaacaacgcttgcaaccacggcgtacgctgctgacgcacatcagccatcacctcgatttatggttgatggccaacgaactgccgcccggcatggaactggcattcgataatctctgcgttgagctataaacggtgcgagcagtgcaactggtcggattctaaaatcttgaccccgctgcctgggctgaaggcctgtgtcagcaacgtttgcgccacgtctttggcggcaacgcccttccatttgcctggcagcaggccaaacaacggttgactgagtcgctccagcaaacgcggctcagcacgagaaccgaacaacattgaagggcgtaccaacgtcaggcgtggccagttctgctcacgcagcgcctgctccatctgccctttggtgcggttatacaagaatacagagcctggattagccccaatagcgctcactaccaggcaatgctgtgcaccaaggcgctgcccggtcagggccgtttcaaccactaactgatagtcgacgtggcggaatgcctctgcgctaccagcctgactgcgcgtggtacccaggcagcagaataccgcatccaccggctgtgtcagttgcgtcaacaactcgtgcagatcgctgccgatcgggttgtgcaatttggcgtgtggcggcagcgccttacgcgtaggagcaattaccgaagtgacctgactatctgccaacagcagacgcagcagttcactccccaccagcccgctggcgcctgtgatcagtacccgtgccatatgatttccccctcacctctgtatgcccaaggcacaaaactgcccgtggagactctctgggtcccttactgcgccgctttcacctcagcgacgtacgtcggtaaatcccaggttccgcccgcatggattaaacggcacaggccggtggtggcctcgttgctttgacgaaacgccgtgccatcccatacccaactggcggtggcccagcaatcacccaatccacgccccttttgccccattgagattatcccttcatcatagccagagccggaattggtcaccaagaccggaggctgcttcagggcactgtcgatcacccaataaccgtaaccttcgttataggccgcccgccaacacacggcggttatcagggcatgaccattgccaagcggggtcagcgtgatgccatcttcgcttgcgccgtcattatcctgtggggactgcatgcggtcgcaatcatccggtttcagcgtcgccagcagtttgggagtcagcgcggcgatctcgggtgccgtaagcgggcgttcttccgccttgggcaccttcactgcctggatcaccggggcaggaatagcggctggcacgctgctttccggcttgtcgccttttttagtcagggcaccaggtgtgccgatacgcccctgcacatcatccatcttcaataaggtggccgaagccccatcgcctgacagcacgaaaggtgcggggccgcctttaaattcaaccgtgccgctgcctttgattgcgccgatcagtgccagagtctggcttgctgacaggttccagtttccatccttggtcggtttgagcgcccccgccgccttgccgttgatccacaacgtcagctttgccaccggggctgagtcacccccttcgtaatccgccaaggtcacttcccccgttgggacggtgccaggcccagcaatgcgcgtgagcagcaccgagccgttcgaatcgcttggctcatcttcattagcgtagcccgccgcgcgacaggtattggtgttgtcacaggccagttcccagttcttatggccaaaggaaacgccgctgtcttgcgccatcgccggggaaaccaatgccgctagtagcgataatgcggctatctcggtgtttttcatgccatcgatccttaatattcagctggtttgtcaacgtgcccagtgcagttttttgccaaagcccagggtgttatcggtcatcttcacttcctgcaacgcgatctgccaaataggcgctttcatcaccttggccaccgggaagcgtttgcagtagcgcgttcgggcaagttcagcctcgtctcccgccaacagagtgattttccccgcatattgtacccctttgatcaacgcaatggtcttgggctggggggcaatagtgccaaccacccggttgttcctttgcatcagttcgccgtggcgggtatgcggctcggtcatcagccatagcgccatgcgctcggcatcgaatacgtaaaagcagttggcgcaccacattgccgtgccatcaccggcacacagcgtgagcacatgctgcttactgagaaaacggataatgtgcagccgatcttcactctgattcaacgtaagttctccttttcacctccgccatcttacccgcagatttgaaggcagtcacaattagcgacaaattatgcccaacataaaactagcatattcattggcaatccatgcatctttatgcaagataaacctgagcgcagtaataacaaataaaaaacatcctagctctattcctgctattacctgtttatattaaaggcggttttcaggggttgagttagcctaagccaaatttatccagtccgctggctccatttgtagcaattgcttcacatatgccttcgctgcagaattcatagctattcacttcgatgcatagaaattgaatagttaagtataaatagcataattaacgtgatctgcatcactttatttccgcatttaggggataaaatagcgccaagtccgaaacccataggtagatggaaaatggaaaacaacaacagaaagatggctcacatccgacgaactacacatattatgatgatggctcaccgcagctgctttagttttgccttttttaacttcagataaactccctcctctgcgttcatattgcgtcttgcagtcagacctatgccaacgatcattccctgcgcctgacggcaacggtatcgctatgtttttgttcaaaacagagtggatccggcataattgcaacctcgtttaagaacccaaaaaatatttcgtcaaaataaactcgtaacctaattatgttcgatgaacatgattacgctcacgcatacctttattttaacgaaaatacttcctggcaaagaccttatttgccggcgggatattttcgcctgaagaatgataaaaatgaacaaactaaaaattgcagcgaaccaaaaaactctctcttgttttgaaaccacacgtgaaattagcgatgtgcaccacagcgactttaatgacgtagccgccatcgtgctttccgtgcaagacgtacagcaaggcctggtggcacagctggaagaaaccggtttaaacatcccgatctttgtcgccgtctgctgtgaagaagaactggataacgccgtattaccggcgctgaacggcgtttttgaactctgtggtaagaacacccaattctacggcaagcagctggaagccgcagccgtaaaatatgaaagcgagctgctaccgccgttctttaataccctgacccaatatgtagagatgggaaacgccaccttcgcctgcccaggccatcagggcggtgagttcttccgcaagcatcccgctggccgtcagttctttgatttctatggcgaaacgctgttccgctccgatatgtgcaacgccgacgttaagctgggcgatctgctaatccacgaaggcgcgccttgtgacgcccaaaaacacgccgccaaggtgttcaacgccgataaaacctatttcgtgttgaatgggacttcggcttccaacaaagtagtgaccaacgctctactgagccgtggcgatctggtgctgttcgaccgtaacaaccataagtccaaccaccatggcgcgctgatccaggccggagcaacgccggtatatctcgaaacagcacgtaacccattcggctttatcggcggcatcgatgctcactgttttgaagaagactatctgcgccagcaaatccgtgaaactgcaccggaacgcgctaacgacgctcgcccattccgcctcgcgattatccagttgggtacctacgacggcacgatctataacgcccgccaggtcgtcgacaagattggccacctgtgtgactacatcctgtttgactctgcctgggtcggctatgagcagttcatcccaatgatgaaagactgctcgccactgctgctggagctgaacgaaaacgatccggggatcatcgttactcaatcggtgcacaaacagcaggccggtttctcacaaacttcgcagatccataaaaaagacaagcacatcaaagggcaagatcgttactgcaaccataaacgtttcaataacgcctttatgttgcacgcgtccaccagcccattctacccgctgtttgccgcactggatgtgaacgctaaaatgcatgaaggcaagagcggccagcgcctgtggaaagagtgtgtgcgcatcggtattgagtcacgcaaaatgctgttggacacctgcaccatgatcaaacctttcgtaccggagcaaatcgacggtaaaccttggcaatcctacagcactgaagccatggccaacgacctacgcttcttcaactttatccctggcgaaaaatggcatgccttcgagggttatgaagaatcacaatactttgtggatccctgcaaactgctgttgaccacgccgggcatagataccgccagcggcgagtacagcagcttcggtatcccagccaccattctggctaactacctgcgcgaaaacggtattgtgcccgaaaaatgtgacctgaactccattctgttcctgctcaccccggcggaagatatcgccaaaatgcagcatctggtggcgctgattgcccgcttcgaaaaacacgtcgaacaagactccctgctgagtgaagtcctgccgaccgtgtacaaaaacaacgaaaaacgttaccagaactacaccctgcgccagctgtgccaagagatgcacgatctctacgtcagctacaatgtgaaagaattgcagaaggaaatgttccgtaagagccatttcccacgcgtcgccatggatccacaaaccgccaatactgaattcgtacgtggcaaggtggaactggtttctctcgctaaagccgaaggccgcattgccgctgaaggggcattaccttacccaccgggcgtgctgtgcgtagtcccgggcgaaatctggggaggctctgctcaacgctatttcctggcactggaagaagggattaatttattacctggattcgcccctgaattacaaggcgtgtatatccagcaggatgaagatggctggaaccgggcttacggctatgtcatgaaagcgtaattaactttaccggacgcggcatatttccttgccgccagacatatttagctattcctcgaatttcaaaaagaatccataccctatggatttcaagttgaagctaggcgacaagctatctcatccccaggagcttacgtttttgtaagtgactggggtgagatagcgcaggtcccaacgctgcagcttgaaagacgacgggtataatttgaggaatataagagcgagaacgatcatgagcaaatccaataataagatgggggttgtgcaattaacgatcctgactgcggttaatatgatggggtccggcataattatgctaccaaccaagctggccgaagtggggacaatctccatcgtttcctggttggtgactgccgtaggctcgatggccttagcctatgcgtttgccaaatgcggcatgttcagccgtaaatccggcgggatgggcggctatgccgagtacgctttcggtaaatctggcaactttatggccaactacacctatggcgtttcgctgctgatcgccaatatcgccatcgccatttctgccgtgggttatggcaccgagctgtttggtgtggccctgacacccttgggcatctgtattgccactatcgctgtgctgtggctggctacggttgccaacttcggtggcgcacgcatcaccgggcagatcagcgggatcaccgtctggggggtaattattccggtggtcggtatctcgattatcggttggtattggttcagtggcaccgcttatctcgccgcctggaacccgcatgcggtgccaacctttgaagccatcgggtcttctatctcgatgacactgtgggctttcctcggtcttgaatctgcctgtgccaataccgacgtggtagaaaacccggaacgtaacgtacctatcgccgtactcggtggcacactgggtgccgcagtgatctacattgtttccaccaacgtgatcgccggtatcgtgccaaatatggaactggctaactccaccgcgccgtttggcctggcgttctcacatatgttcaacccaacggtcggtaaaatcatcatggcgttgatgatcatgtcctgcgtgggttcgctgctgggctggcagttcactatcgcccaggtattcaaatcctctgccgacagcggcttcttcccgaaaatcttctctaaagtcagtaaatcagatgcacctgttaaaggcatgctgaccatcgtgattattcagagcgtgatgtcgctgatgaccatcagcccgtcgctgaataagcagtttaacgtgctggttaacctggccgtagtgaccaatattattccgtatatcctgtcgatggccgcgctgattattatccagaaagtagccaaagtaccggagaacaaggcgcgtattgccaacgtgattgccgtgattggtgcactgtatagcttctatgcgctttacagttccggcgaggaagcgatgatgtggggcgcgatcgccaccttcttcggttggactttgtacgggttggtttcacctcgctttgagatggctgagaagaaggcgtgagttttgataacaaagggcgctgtatgcagcgcccataaagtttaggtttatcagttgtctaaatgggcacttcggtgcccattttgctaactcaaatccgccccattgctggcaatcaccttcttataccagtaaaacgatttctttctggttctggccaaagtgccattaccctggtcatcgcggtccacatagacaaagccatagcgcttactcatttccccggtagaggcagaaaccagatcgatgcagccccaggaggtgtaacccatcaccgggataccatcctcgatagcgtctgccatagctttgatatgctcacgcaagtagctgatgcggtattcgtcgtcgatctcgccctgcgggttgatttcgtccttcgctcccaggccgttctccaccaggaacaacggtttctggtaacggtcatacatcatgttcatggtgatgcgcaggcccagcggatcgataccccaaccccactcactggcctggatatgtgggtttttcagcgatttgacgatattggcagcgctgctgttgtgctcattcatatcagccgaggcgcagcgggaggcgtaatagctgaaggagacaaaatcaacgctgtttttgaggatctcactgtcgcctggctccattgctatagtgatacccttttccttaaacaggcgcttggtgtatgacgggtaagcgccgcgagcctgaacgtcgatgaagaacaggttctcgcgatctttctccagcgcagcccagacgtcttcgggtttacaggaccacgggtagaaattgcccccagccagcatgcagccaacctgattgtgcgggttaacctcatgggcgattttggtcgctaacccactggccaacagttcatgatgcgccgcctgatatttcacctgctcctgattatcgcctggctcgaacaccagccccgcgccggagaacgggctgtgcagcaggatattgatttcattaaatgtcagccagtatttcaccagcccatcaaaggcttcaaaacaggtacgggcgtagtgcgtgaagaactccaccattttccggttgcgccacgagccgtattcccgcaccagatgcatcggcacatcaaagtggcacagcgtgaccagcggttcgatgccgtgctttttgcactcattgaaaacgtcacggtagaaagcgatcccttccgcgttcggcactctttcatccccgttagggaaaatgcggctccaggcgatcgaagtacggaatacgctgaaccccatctctgccatcagggcaatgtcatctttatagcgatgataaaaatcgatgccaacatggctagggtagaactcgtcttcccgcagctcaaagcgcttttgctggcccagctttaccgccagccgatctttgccatgagggatcatatcaaccgtggtcagccctttaccgccctcaagataagcgccttcggcctggttagccgctagtgcaccaccccataaaaagtctgcggggaaaacagatgctggcataagatacctcttctcaaatatgcagttttacaacaggttatacgtataacgcgggcgctgatttagctttttcactttccgcctcttcggtgaccgggatatcttcaaagcccagcaacagcgtaaggatgaaggaaagcaccaccgccaaaatcatcacgccaaacacccagacaatggtcattgggttggccggatcaaagaactgcacgctggtaaacaggcccggagaggccatcgagtggctcccccatcccgcaattccggccacaccgccgcagacaaagccactgatcagcgctgcgataagcgggcgcttcaggcgtattgccaccccgtaaagcgcgggttctgaaatcccggccacaatcgccgatgccgcagcggccagcgccgtctgacgcagttccgggtttttggtacgccaagctaccgccaacgatgaaccgcccagcgagaggttggcaccaatttcagagggcatcaccatgccttctttgccggtttccgcgatggtttgaatgatggttggcgtaaatacgcggtgcatcccggtcatgaccagcagcggccatagcccccccataatcgctacggataaccaccccaagtagctatgaatggtgtataccagcgcggaaatgccgctaccaatccaaatgcccagcggcccaatcaacaagatggcaatcggcgcagaaatcagcacgatcagcatcggtttgaggaagtttttcgtcacggctggcgtgatgcgatcgacccatctttcaatgtaggagagcaaccaggtcatgaacaacgccgggatcaccgtgtaggtgtatttcaccgccgtgaccggtatgcccataaattcaacctgttggccctgcgcggctttcgccatcagatcgataaatgcgggatgaaccaataccccggcaatcgcaatcgccagcgacatattggttttgaattttaccgctgcggaagcggcaaccatcaccggcaggaagaagaacgctccgtcgccaataacgttgaggataatcagcgtcgaggagcctttgccgaacacgccggtcatatcgaggatcatggcgagcagtttcaccatcgagccgccgataatggccgggatcagcggtgacatggtgccaatcagcgcgtccaggatccccgcaccgatacgtttgagagtgattttgctcttttccggcgccggttgctgggctaccgccccttcgggcaacagtttcaacacctcggcataggcctgtgaaacggtgttgccaatgatcacctgacactgattttcgcttcttaccacacccagtacgccaccaattgccttcagcctggcggcatcgacgagggtgtcgtcgttgagcacaaagcgtaaacgcgtcatgcaatgagtcaccgccgcgacgttactcgctcccccaactgcatccactatcgatcttgataccgccgcataattcttagacatgaggaccactctcatagataggtaaccggtttcacataagagtgttgatattaagattgcagatcaatcgatatatttatttattgtctgttctgtgactgagatcgacatgagtgggtttgcagtgctgcgaatggcctgctctaacgcagtggaatgtgtagaatggggataattgttaaaagccgggaaaaccctatgtctaccatgcaggaagtggcaaaaaaagcaggcgtctcaaaagccactgtttcacgcgttctttccggcaaagggtacgtcagcgaagccaccaaagatcaggtatttaaagccatcgaagaagcgggttatcgtcccaatctactggcgagaaatctggccaccaataaatcccagtgcattggcctggtggtcaccaacaccctctataacggcagttatttcagcgagatactttcccaggcggcgcaaaagctggaggacaacggtcgccagttgattttggtggacggcaaacacagtgccgcagaagagcaagaggcgatccaattcctgctcgatttacgctgcgacgccatcatcatctacccgcgtttcttaaccatcgaagcgatggacgacatcattgagcagcacaaacaacccatcatggtggttaaccgtaggctgagaaaacatcacagccactgcatctgctgcgaccacaaaggagccagctttaaggcaacaaaatacctgattgagcagggccaccggaatatcgcttttattaccggctcactggattcgccaacggcgattgagcgattatccggttataaagaagccttgaatcaatatgatatcgggtttgatgataaactcatctttaaaggaaagtggacaccagccagcggtgcggtagcgatggagtccttgctcaaggataaaatcacgtttagtgcagtacttgccagcaatgatgatatggccattggtgccatcaagaaattgaacgaggcgggcattgccgtccccaatgaggtctccgtgatcggcttcgataatatcccaacggctccctatctctccccggcgttatccagcgttaaagacccggtgagcgatatgatgagcgaagtgatcgaccggctgatcgctatgctagacggcggctatctgtcaaaggacaacgtttttatttcggagctgctggttagagattctgttgctaagggacctttttgggagcagtgagctagcgggcacagtatccggagccagcgcgcaaaggctacttctgccctaccctccatacaccgtgtgatttccacgcgtattaccatcctttcctcaagaaactcgaattattcttagcgtaacctattgattttcaattaataggggttttatttttgatggcccctctattgattcaacagcgcctaagcaacatagagcgacattttcagcttcatttccgccagaccaacactacggagattggaaatgtatcgattaaaaacaatgtaacaataagcttccagagcaaggtgttttgaaaaatatatccataagtcaacaaactttgacattacataacgcgtaccaaataaataacatatttttcaattggttaaaaaaaacctttagcaagactccgtttttttacgaaaaaaaccactataaattgactgtatcagtataaatgactaccactcactgtatttatataaaaaaaaacaaaataagtataaacgcaggtataaaactctaggttcatggcatcctgtataacttacttatataaacaagaattcccttagcttaaattaaggtttttcatgtttataagtgaggattttctcaccattaataacttactttcccaggataaattaaggaatttaaaaaaaataataaaatagagaggactacgcattagcaagataattgacagaattaagcacctcctctatcttatgctccgagtttggtactcaatggccatttattattaacctgttcgccaataccagttctagcattaaggttttttaataaataactaaagtaccagaccaacgacaggttagggagtctctgttatgatggattcaaaagtaaactggtgaagaaattgacttcttctgcaactgaaattggttcaatccgttctcactaaccaatttaaataatgtaaatggaatgacaatcattatgaaaatcaataaatcaacgttgttgttaagcgtattcggtttggtctttgccggttctgctttggcttctagtggcactattactatcactggtaaaatcactgacactacctgtaacatcagtgttgatggccagactagtaacgcgacggtaacgctgccaacggtacctgcaagtgcgttacctttagcaggtaatactgcgggcaccacgcctttcagtattgctctgtcaggctgtactggtagtgtctttgctacagcccataccttgtttgaagccggtacttatgttgaacagtctactggccgtctgaaccttaccgctgccagtactgctactcaagtgcaggtggaattgctgaactccgcattaagcccaatcaaggctggtgcaacagacgcgactcaaggcgatatcaacactaacttcaccgctgatactaccactctgaattactttgcccgttactacgcaaccggtactgctggcgcgggttcagtaaatactgctgtcgattacaccattatttacctgtaataacagagattattagtattaggtgggggataccccacctttctataaggggtagcatgtgctacgtaaaacggcttttatcgtaatcagcttattttccttgtttaattttcagcttgcgcaagcggctgtggtgattaatgccacccgggttatttataatcagcaagatgacgaatccgtattgcaattgcaaaacaaagggcaggacgcattgttggtccaatcctggattgatgatggcgatttaaaggcaacgccagatacggcacgtagtccgtttacgctgatgccgccagtggcgcgtattgaccctagtaaagggcaggcgctgagaattgtacgcaccaagccgattgccgcggcagatcgggaaacattgtactggcttaacgtcctggagatcccgccaaaggcaaccaagcagatggcagcgggcgctaacctgatgcagttctcttttcgcagcaggatcaagatattttaccgcccggccaatttggcgataacgcctaggcaaggctatgacaagctttctttcaatttcaagaaggaaggtaataattacgtggtcctggtgaaaaacccttcaccctatttcgttacgtttcgtaatatagaactcaaaaataataaggactcgattctccttggcgggataggtaagcagccacgcatgatatcgccgttcaatgagttgaaatttacgctagagggtttaaaaagccaaccgcaacccagtactgcgattttttacagtataattgatgactttggcggagatatacataatgaatggaagctcaatagcaaaatcagccaatgatggctgcttaaatttcccaaagttaattcatcttgttggtatattcacgttaacaccgctggcccttttttttagcgcattcgcatccgcagcagatagtgtggagtttaatgattcatttctccgctcaccggtcaatgtccgttcttttgaaaaaggtaacccggtttccgccggggtgcaccgtgtcgatatttatttaaatgaccaatggattggccgcgaagatatcaactttgcgctgcctgttgctgcagcaacgattgctcaaccttgttatacgctgaagttgatggatctgctgggctttgatctggataaaatcgacaaggatattcaggcaaaactggcctccgctgaacaatgcctgccattgggccaattagcgccaggaacccaggcatcttatgatagcggtagccagcaattaaatatttccgccccgcaaattatccttaaacgtaatgccagaggctatgtcaacccggcgttatgggataaaggcatcactgccgccatgttacaatacaattataacgcctatcattcggagcaatcaggggtgtcgtctcagacatcacagtatctgggcttacgtggcgggtttaattgggatgtttggcgtttgcgctaccgtgcgacagcaaactggggcaatgggcaaggctcaagttatcgcgggtcggaattatatgcggaacgtgcgttagttaactggcgcagcaaactgattcttggccagtcgagcaccgacggacaagtctttgacagcatcggttatatgggtgctcaagttgcttccgatgaccgtatgtatacagactcacagcgtggatttgccccggtgatccgtggcgttgccaataccactgccctggtgagggtttctcagcggggtaaccagatttatgaaaccaccgtgccccccggtccattccagatagatgatctctatccttctggtgttggtggtgatctgttggtcaccataaaagaggctaatggtaacgagcgtagttttaccgtggtgtattcatccacccccgaactgttacgcccaggggtaacccgttattcggtggctgccggtacttatcacaacactgcggtttcctccgccccggccttgctggtggctacggtaagacgggggttctcaaacattgtgaccggttattccggggttattggttcgaactattatcaatcggtctccgccgggttagcactcaataccggcattggcgctatttcttccgatattacccagtcaaggagccaattaagcaataatgaatccactcagggccaaagtatcaggctaacctacgcaaaaatattacccgtcattgataccaacatcaccctggccagctatcagtactccagctcaggttattacggcatggatgaggccatgagcatccgtgaaggatatcaaaacaatatttatagcaattattactacaccacgataaatcgccgcaatcgtttccagatcaatgcgtcacaagccttacctgagggctggggcagtgtttctgtcaatgccaacatgcagaattactggaatagaagcggtaccgatactgaatatcagatggcttataataactattacaaacgagttaactatggggttaacgtcgggcgtacccgcgatctggtaaccaatagttgggataacaaagtgatgtttagcgtgtcgatcccattgggttcgagcgataaggcaccctacttaaccaccagttatacgcaagagaaagatcaccagggtatacagaactctgttgccggcagtgccggggaagatcggcaatatggttacaatgtgtttgccaatggcgaccgtaattccggtgatcaatcacagaccaccgccaccggtgggggcagtgcttcctggtcagcgccttatgccaccttgggcagcagtttctccaccagccgcaattaccaacaatacggtgccgatatctctgggggcattgtggcttacagcggtggcgtggtgcttaccccgctattgggggataccacggcgattgttgaagccaaaaatgcccaaggggcgcgcgtcaccaactataacggcctgcgtctggataaatggggcagagccgtagtgccttatctgacgccatatcgtcagaacggggttgaaatcgatccgaaaggcatctcgcacgatatagaactcaaagccaccagccagaacgtggcaccaacggcaggggcggtgactctattgcgctatgaaacgacagagggttattccgtgctgattaataccaaagatgcccgtgggttaccactgcccttcggtgcaacggtatttgatgcagcgcatagagacgtcggctatatcgcccaggccggtcaggggttattaagggtcaaacagcagcagggggtattaaccgtgcagtggggcgatggggctggggcgagttgtacatttaactacaaactaccaccatttaccgctaaaaccgcggccgatttccgtcgccttgatgctatttgtaagtaaattaaggaaaaataaagatgacgacgatgcaagctgccgccaatcgcgctgtaccgcggttgaccgcacgggtaggtaacaaaatcaagctgaccctgcttttgctgttggctctggtgctggcaggaatacacacaccggcgaaagctgaaggttacgtggtcaactgtacccgtaatggaggtatctattaccagtacttctctaccaccacgatccaggtcggtaatgatgctcaggtgggggatttactgggtagctggataacttcatcagaccctagtgcctggacctgtacgccagtggtaaataactatcccaatgcggtagtacaaatgagcacacagggctacccaccttataccgtttggggaagcaagagtgttgacggcgcgacgtacaacgtctacaacaccgcagttaaagccggtttaggctatgtggcccgttggcgttataccattaagggcaccaccagtgcctggcaaccgctgacgatcgccaccggtgggcagcaagattcaaccacttcggtcaccatctccaacaccgatgggccttttactttcggcgttgatgtgcaagttctctttgtcaaaacaaacaatgtgttgacagccgggaccaccagcgcattcgacccaatatatgttcgctggaagcaggtctctaatacctccgtcggtacccaattaggtagcggctcgtatatgatcgccgactttcaggcagggaggttgattaccaacgtcggaggaacctgtaccacacccgatgtggccgtaaccctgccggatgtcgggcgaacccagtttaccggtatcaactctaccgcgggattaaccccctttgagttgaagtttaacaactgttccagcggcatgaacctggtgcagtacagctttgcgccaaccacctctgtggcaaatgcggctaatggtgtggtggtgctcaatagtaactcgaccgccaccggggttggcatgcagctattattgaccccgacgacaccggtgacctttggtaccacctatccactgaccagttacgaccccagcgtgagcaacggcaattataccctgccgctgtatgccgctttgtatcaaactgcaactgcggtgacaccgggcttggtcaatagctcgataacctttaccgcaagttataagtaggctaactatgacaatatttagccgcaattggggtaataccctgcctgggctgattatcgctttgtcccttttatccgcccaactgtcgtgggcggctatttccctgggccagacacggctgatagtgagtggccaggataaagaagcctcattgaaagtgagcaatgaagggacaccgcctgtgttattgcaagtatgggtagaccgtggtgacaatgccatctctccagagaaggttgcggttccctttgtgatcacgccgccagttgtccgcttggacgggaaaaactcacaaaggttacgggtgatgtttacggggagcgacacggacgttcctgccgatcgggagtcggtctattggctgaatgtcttggagataccgccgaagtccgtggctggtgtgtctgtaaataaaattcagttagcatttataacccgaataaaactattttatcgcccgcagaaagtcaacgccatggatatctcccatatagagggaaaacttcattttagtttactcaatcaaggtgaaaagatactgcgtgtcgaaaattcaacaccaatcaatcagacgctgatttccatctcaattggacgtgacataaaaaatcccatagtcagatttaaccctgaagacagcatgatctcaccttactctaccaaagagtattcgttattaaaaatcaaagggagttttgacaagacaatgaaagtgtttacctcaacgattggtgattatggtgaaataattaacagcgagaagcccttagatgactagagacttaataactattcctatgcgtacaggtgcgtcccccaaagttatcagaaaagtaacaatatcctttacgtcatttttccaggctagtttgtagttcgtaaaatcacgtaaacatccccttttttatcaagcgcatgcatattttagccttgagatggctcgtcagtctataatcagactgacgagcacagtaatgatataccaagactttccaagtatataattaaccatatatggttgttcacgtaatagtggtatcttcgcgacgcttatagagagaatacagtcaacgatcaagtcgctgttaattcgttagaagcctgttacctcttcatacatcccaaaggaaataccgtcacactcatatcaataggatttataaatgcgtgccaacttgagttaattccgagttagaacaggggtaactctaaacaattggttagtaggaattaatagagactgcatactttttacacctaattttcttaaggcaatccgcttataataccctaccaatttagaactaatagataacatttgagctatctgtttatagttaaactccattaaaatcccacttagtacctgccgttcacgtagcgacaagaccttgacattttttttattatatgaataaagccctggattattatcaacaatgagttcattaatctgtttagtaataaatgagagagaattttgtgtgtcgataaatcctatccgactactggtctcctgcaagtaatctatcagaccagaatttctgtatatgtctataactataagtattctatgctgatgattttctttgtatataatatcaataaaagacaagacatctattacggaatagtctactccttgcaaggagagtatgatcaaattgggtttattttcagaaagcaaatgcaaatggcattgaagtattttttccgtactgagtacttcacagtttgctggtaaaagaccaatcagccccgaccgggtaaattgacatgggtgtaaaatagtagcatgcgtaatattcatttttaaatccttaaatattttacgtgttatccataacagatatattgataagatatcactacaaatttaaccaaaaaaatatacaaacgaaatcaaacaacaaggaaaaaacattaaaaccgaaaacccattaataaaccagacactcagtctatgatatcatttacttcaagcaaaccaacaaggtcgattacgctatgaatattcaacttttctaatatatttctcttgtgagaacttactgtttttgcactgatattaaaaaactttgaaatctcatggtttttaagacctttggccaaagcaatagcaatagaaacctctcgctttgaaagctgactaaaaacacccaactgaacgccatcactatgatcgctgtagcttggaaaacagttaatgtcgttaacaattaaattaattgcattcaacaacacttcaaatgagtgttttctggaaataaaaccattagcccccatctgggaaaccctacgcgaataaaccccctcattacttccagaataaactaatatcttagtattcttgcactctctttttatgctagaaatcactttcatggttgacatattgacatccagaataattaatcccggtttttctttcactatctccacaaggagatctaagttattttcaggactgccaataactcgcatacccaagcgactactgattaatgtcgctagagaatcacgaactataggatgctcatcaataatataaactgatggcttaatgactttatttatagtatccataaagaaaccaccacttgcagaaaggactcattgaattttcatagccactttttaaggaacagcaaattatctgaaacccgctattgataattgatatcaatagttgccgttgcatttgcagttccactgctggaactctgcgcatttgctgtcctgtaatagttagccgtgaaccgaataacatctgaggtcacactacccacagcatcacctacggcaagtgcagacgaggagtttgccacaccaaatttaacgggttggtattgcccaccagactgcccaaaagataatgatttaagctgaagtgcaaacccttttgccacattactgccactgaatgcaatcaagccaagcgcattactaggatcattgatggtatcagcctgaccagcattaactcgataaatgactgcggttttcggcaagcaacgcaggccaatttggaatgataccggtgtcgtggtcgcccccacattctgactggaaaattcagaggaaatccggttacccatatttactgttttatacagatcgctggaaacaatgccgcaggtacggaccgaaaaatttacgtggtcaatatataagtaaaaataaaaatcatcataagcggttttgtccgaactggtataattaaccatctgaaatcgcatatagtgcaggagaccgccggttccccaagtaaacgaaccggctacggcgttagccgtttgatacccctgaaagcccacattctggatcccaaaatcctgcatacggatcaccactggattagtgggcgttgcgttggcagccaggataaaaggtgcacccagagtattagtacctgcagcaccggtaaaccagaccttatccccggccgggctgttgtaccacatttctgcagaatagtaatagttaccattaccataggcggtggtctgctgcatattcggataccccttattggtaaaccgggtatctggaatcaagtgtgtttgtaacaccggagtgacctgcacgggtgctgtacaggtcaagctccatgcggcactgccgctgttcgatgatggcgtagcataagtgctattcgtcgggctgggatatttaccatcatttacagcgacaataccatttgctgagggtatttctacgtagggattcagtaccggaataccaggagtccagacacaggcacgaacggccagtgcctgttgcggtaacaggccagataatagggtgataaggaatgctcctatcgcccgttcattacgtataatctttactagaaatagtttcatttttgttctctggcagcttatttcataggtgtacatggcagggataattggcgcatcccatgagttttgtcagtcgttttctctttggcaaaatgatagcgaatacggcactgtccggttaaatcggagcgccaagaaacaagcagcagtccatcatcattcaagccactggcatacagtacgcccccctgaccaaccataccgacattattgcccttctcatccacaaccattgctcccataggtaaaggttcaccatcaggtgtcgtactttcgatgaacgctttatttcctgaacgggtatcgaatttaactttgacgattgcaccactatagggcacaactttgctaccactgcttaaaagttccgtattttcagacatgccttgtggatcgatattaatagtgttattgcgatatgcactgagataaggcacaatcgcataaccgaaacggtcaatagtgacgcctgaaatattttccactctggcacctgcggcatcttttgcctctaccaatgccatggcatctgcagcatattgccccaaagtcagcccaccagaatgaacaaccgcagagccggacatccccaaggcatattgccggaaatttcttccctgactggctgacactgatgcctgccccatggagtgattcttagccatattgccagacacagagctttgattgtgggaatcagtactgcctgacattccataagacagagagttatcctgccccaatgagccattaagacccagcgtggtttgcgacaagccttcgctattagtgttaaggctggtggtaacactatgatatccataacgttcactaccaaaggggatacttaatgtcagcatatattgattttcgctttcacctgaattattgcttactcgcgaaatagaagtgccgacattaatatttttaactaaaaatgaatatcctgcctgataattgctcgatgagccaggcctatcccaataggataggatagaaccagaaataaacagactaccgtaatctaaaacttgttgactgattgccagttcaaagcgccctttctggcgcagaacatgactataatccagctcacgctgttgtgctgcctcattgaagccataataacccttatcagaatagcgataggtcgctaatgataaaaacgtttggctaatttccaaatacttgctatgagaggctttaacactccaacctcggctgttacccgatggcaggtctgccgatgagcctgtaatatcaacccccagtgcgccaagacgggtattgaatgcagaacctactacagcagactgataattttcagcgaactgactccctgcataggccgttatattattagataccccacgggaatagagtgcttgcaaaaatgtaggcttgctacgtaaaatttggttattcaactgaccaaaggtcacagcataacgggagctattatcccgtaataatgatgctaccgaagagtaaggtactgaaaatgtctgtaccgtcccatcagtttcagtaacaaccacatccagttcaccgccatatccagtaggataaagatcatcgatcgcaaaagcgccaggagcaacggtagttttatttagcaagactcctcgctggcttacttgtaccagtgcattggtacgcgctacaccacgtactaccggtgcaaaaccctgctgtgaagcaggcagcatgcggtcatcggaagcaagttggatgccacgaaagcttaagctatcgaagtattgtccggatgtattgtattcaccggctaccaacatacccttaaaggctggtaatggtcgttgcagataactgttcagcgttgtccatttactaataccgttattgctgctgctatagttggaattatttctcagctgccacaaacctaagttcacgccactattgagtaaggtgaaaaagttagaattagtaagtgcctgttgattaccattaatacgggattcataatagtttgcattataattaataaagcccgcgttaatacccgcatcccacaatgcttgactaacgtccccttgagattcacgttgcaagtaaacctgcgggatcgaaaaatccacagccaagtctggcatgtttatgatataactggcagtcggtatcagtgagttgagtaacacacagctgccggagtctgaatcaagcggcacattttcaagcttaagatccagcaatcttattagctctttactcagacagactacttttttattttcaatatctttaatgagtaagttggccttacccacaagctttttattaaccagaatagacatgctataactacctggtgtaatatcattaccatatgcaaaacgcgcaacatcgaccttttctgagcccactaagaaactagtgttatataagtacgcctgccccttggaactatcctgcggtatcacagatgcatcagtcccccaggctgcccccaccagagttacattggctaacaataataccagagcaactttagacgttaaatttctggcagttgcttcatttatctggtccatagagagaatgtcgtccttatataattcaaagcaggttataaaagtatttcagtatattcctttgcaccaccttgatcgttaatgagaaggtagttcagtttcataggcaatgtactttctggcactttaaccttggtactcaaggatccgaatggtgcgatcatgccaaaacgttgtaatgaaaccgacacgggcttattattcaccatgacatcaacctgagaaaaagacagatagtaaggcgatgtatttttacaactgagcgtcagcatctgcggtgtctctttgttgccagtacactgcatctgtttagccagctcatccgtttttggtgttgccagttctgctgggcgataaaatagttttatcctacttctgaatgccagctgtaaactattttctttattattggcgtctgttggcggtatttcaaagacattaacccaaaatacagactctctatcttttaccgatatgctaccattataaattatacgtaatgactgtccctgcttaggttccatacgaaacattggcggtgtaatagcaaacggtgtttgaggcatttttgccgacatggctgaatgaccatcatcaacccatgcttgtactagcactggcaatgaattgtcattttcaatgcgcagagaaacttcctgtttatcgctaggaaagaccactctcgtaccgtgtataataacacttgcggacgcataactgacatagttacttaataccaatgccaagatgatatagggatttactttattcatattagtcttgtgaaaatcgaaaatgaatagaggggcaccccctctatataataatttagctaacttactggtatgaaagagtgtaagatacttcagaatttgcagtccctacctcagcctcaccagttgcgtaataggctgcaacatagttcagtgtcgcattaccgccagtcagcgtaacgaaggtttgtgccggaattacaccgttgacaggctgcaaagcacccaagttgtcatagagcgcgatttcaacattactggcttctgaggtagcatccagattcaagcggccagccgggttacccaacgtcagagactcgaaatgagcggcaaccgcggtgttaccacctgtacagcctgtcaattctattgcgaagcttttcgcgccagcagtctgcccggaagtcatcaaggatgatgccggaacattgcccagattgactaattgcggagccgcaacgccaccattaattgaacaggtgcttgcagtgatattaccggtgaaattaacctggccatccgcagcacttactaaatgggaggcaccagccaagatgaatgataatgctaatgcaatttttttcatttaaaataccatttaagaagtaagtttccctataatctattgactagatcatatcatttgagtcattccctagcgaactagggaatattaataactcaacaccccgacaaagcagaacacacttagccttgaatgcctgactataatagttatcttttcctatttgtgtatagatatgaatcacccattttggggtaagctttttcctgaacttctctaggattttacttatttttcactcggaaaaatatcctaaaatataccatcccattgtttttattaattttataaccatatctcctctgcatttacattaattgataatcattcgtatttgcaaatatagttatatcatgttccaatataccgtgcatccgttcaatataggatacagatggtaaggtaagtttaggcgttataaatcatggtcgtttcagtatctaaaccgggccattgtcggcaatgcctttcgatcagggcaaagaagtcccctaattggtcaacgatgccaatcccccatcttaacggtcagtttatttcaagacggtaaatgttttagccctgctatagccacaatcaagctgatttttccggtggctaaaacccttgatgcagcctgcgtagtagacctgaaaactgcaaaacggagtaacaacctattggtgggtagtgtcttttgtggcaatcgcaggccaggtagtcgaagttctcacatcggttgagcgagtattgctgatagcggcacaaacagctgtctgattttcttcatgttaacccacccaacttaaagaccacgtgatatcaccttcataagagtgatatgcactttcatgtcagcggctaaccccctccgtctactacctatctattttcactactatatatattgaaccgctcgttatagcttaacgagagattaatttggctattacggcctatttttaacataccacttacaattaaaactaatttcatatacttgcagcgtgtacctatcaacatttgctttgtcctatacctattgatacattatgctgctttagttaaataaacaaagttaattaccacacctaaattgattttcaggattaaaatgcatttttttgttaaaaaataaaatatatacccaattgacatttacctcagtatcataagcagggataataaaaatcgattatgatctgatgataataaaaattgaacgtaaaacattgggttatcagtcatagtcagaagcaatagtttgataaattactgggaactgcctaagttcagtcgttgtactgtaggaaagggtgattgggtcactatagaggtaagatgacgactacctaaatggtctttacagctattatctcacgactgcaagtcagtcataacgagagttgtatgagagcacattatagcttgaggtcccacatgaaacgggcattaaatataaaatagataacactactttcgataccattagtatattttatctaatctttctcttgcccccccctccaggggacgttgaagagtttttatcggttccaattttcaatccatccatacttaattttaaaaatcactttaaatggatgtttattgaagtatttagcactgcaaaaatcaatgtgaatagattttattatgctaaggtgtggaactaacaaacttacctatgtgtttaacgagttataactttaaacttattgatttttaatgttaaatcttgctctgaggtaccttggataaaataagggaccaatgagagtcgataatcgggtatttttaatttgtaattttaggtggataacttgaatatttatttattttcagaagatatgtttttccatgccggtttaaatgatttagtagaaaagaaatacggaatttcagttaaactcattaccattagaatgatgatgaattcacataaaaatggttttataatggaagatgacgtatttatgatagccgctggcggctttaattttacaatgtctatattagtgatgctgaattatttttgttgtcgttcatatatactcccctatgatagaaatggattactaaatactaatttattttcttcattcttatcctgcaaggtagacgaaaattacattaaaagcatagttaaaggacacattatatcaaaccttcctaaaatgtgtaaattgagttataaagaggcaagcgttttaagctatagacttcagggaatagatatatacaatttgagccgactgttagcagtgagcataaaaacagtttacactcatcaagaaaatgctctaaaaaaactaggtgttagaacactctcacatttgcatatgatctgaactgttggcttttttcatattaaacaagtcagccagaagatgaagacatgatttaaacagctaataaaatggcatttgaaataaattagcattcttcctgaaatcattctggataactttcaccgctccattaaaattagttttttgttggagaagatcggagcatattctgtacatccgctctacatttcttgttacaaaacgagggtgctaacagattaagcaactataaaatgccgctaatcgcattagatttttgctacgctgggccaaaatgatatcatttacttaaaaaacagcataattctataaatgaactataatgataataaccattagaaatcataatgcttaaattaagttaataagtcggttttattatatatgattttggagtagtatcatggcccttgacgttcagttgaataagtcagtcgttattattgaggatcacccatcagtacgttttgcacttagaaccatcctgtcaacagagaataatattgatgttattggtgaggcaagtaatggccaagaaggtatattagctgtcaaaaagctaaagcctgacctaattatacttgacttaatcctacctgacaccaacggtctcgagcttgttttcaacattaaaaatcatgcaaaaaactcaaagatattaattttttcaagtcatgatccgcgtatttacgctgaaaaactagccacaatagggtgtaatggatatatcagtaagagttgcaccacggaggaaatattgagcatggtacgttcagtacttgctggatataactgtttcccttcgaattctcaatggagtaaagaagttaagacctctgacactggcgacatagttaatagattgacacatagagaactcactatttttattgctctagctaaagggcagagtaacataggtattgcacaggcattaaatataagtgaaaaaacagttagcactcacaaactaaatataaagaaaaaacttaaccttaatagttctgttgagatagcttcattcgccatacttcatggcttaatcaatggaggctgatttattatagagtttcagaaggaggtgttttatgaacaacgctaaaataaattttatttttatgtttttagctatttttagtgttagtacttcttttagggtcactgctatcgaaaccctaaaaaaacagccattaactaaaattgaaacggcaaccgcctcctttccagcaaccaaattgataaaagagtattgtttgtcaagctattcaccttccctcctaaaccctgagagttacctatttagggatgaaaaaaaatcggagcaaaaaattattttcaatcaggatgaacaagattggataaaatctcacccgataatattttatagtatcaccaatgatgagacaccgttatctttttcctcaactacaggtacgcccgcaggctttgctgctgaaaaacttgatgatctaggtcagcgtattggtgtcgtttttcagggccggttaaggcgcacacaacaagagttgttcactgatattcaacaagggaatagcacatttataccttatatctataaaacgcctaaagataaacctgacttactgtcgctaactatcccctacaactattcattgctagtcatcatctcacgtaaagaagggccacactttaagagtatggcagccttaaagggaaagattattgcgttaacagcatcacccaagcgcgcattactagaggaattcaagtcttttccggtcaatatgacattacaatcaaaaacatcagatgctttaaagctattaacccaaggtaatgtcgatgcggtcgtcgctgattttactcttgcaagttacgagatttcacataactaccagaatgaattggtgattgatgggcccgcattacccccccctagctatattccttacagtataggtgtcgctaaaggccaacctgagtttctgagtataatgaacaaagtgatactgggattgccaactaattactttgaattaaaacaacagtatgatgccaactcacctttcccagagaaatcattcctttggaatcaaaataaattccttgtaggtgccactgttgtttttattattattttattctctttattctggattaaattattgtggatacaggtaaaaaaaagaaagagcacggaaataaaattactggatgaactgtcttttcaacgagtactgtttgataacttaccattagcaatgtttgtcgtgaaaactgattttcaaatagaatcaggcaatccagcttttatggagctattgcaaatcccagcctccgatgctgatgaacccactctcttcatacttaatgagtatccccatttcttcactcaactcagagagatctattatcaatcgaaggataccggaaaagcctgttttaaagacttgagttttactaccgaacatgaaaccagtcatttatatacctggagcattcctttctataacagccttggcgatattgcgggtatgttaagcggttggctggatatcagcgaacgtacacgtcttgagatagcgctgcgccaggctaaggaactcgccgacaaggcgaatcgtgccaagtcaactttcctgtctacgataagtcacgaaattcgtaccccgttgaacgtgatcattggcatgttggaattacagctacacagtaatgaattagcgctgcaacagcgcaatgaattgacgattgccaatgaatcttctcaacatttattaatgctgattgatgaccttctggacttatccaagattgaagcagataaaatggttctgcaaacacaacctgtctgtctgtctgaacagcttggattgttagaacggatgttttctcctatggccaagagtaaaggtcttgattttattttggagttcaacggagatgcgacagattgttggctactggcggatcctttgcgactgcgccagatcttagccaacctgctgtccaatgcggtgaagtttacccggcaaggaaagattaccttccaatgcacggccaatagaaaacctgatagcgattccataacagtaacattcgaagttagtgatacgggcgtagggattgcaacatcggacattccaagattgttctcaccatttactcagattgaggatactgcaagatatgccggaggcaccggtttaggtttaaccattagcagacgcctattggatatgatggcaggctacattacgttgaacagcgaactgggtaaaggtacacaactgcatatctgtgtcacatttccttcggtgcaacccgttgagaacgctttgccaattgacgcagccacttcggtgcaatcattgccggagtctcccccgatactcatcgttgacgatcattctgctaatagaatattgctatctactcaattgcagcaactcggtgccaacgtcacgactgcaaatgacggggtacaagctctggaattgatggctaataataaattttccttaatcatcaccgatgtcgctatgccaataatgtcaggaatgacgttggcagaaaaaatacgccagcgtgaagtcatacgaggagaaaccagagtcccgatcgttggtttaactgcttttgtagaacctgaaatatttggcgaggcaatagctgcggggatggatctttgtttacgtaagcctataggtctggcgaaatgggccgaaatattgccacagttttgtctatccccccttaaccccagcactgaactttctttagagcaaggtctacaacaacgtttactggaagctttggcaaatcagcaatctgcagtcgcgatattcttgcagtcactttggcaaagtacgttggccgatcgactcgaagcacaacttcaccaacagaatggggattggctgttactatctgaaaccatacatagactcaaaggcccatttagttttattcatcaagatgacattgtgagcatatgtaatcaattagataccctgtgtcgcgaaaatgcgccaaacccggacgcaatctcacaggctctgacatttttggcgcaacagcttgatgactttaagagccagctagacaaacttggatatctcaaccttgagtaaacagatggttcacagcttggtcatttatctgttgaactctggtgggtaacgctgaaaaatagcgcagtccatccgccagaatgatcactagaaatttacgcaggccgttatgactgaaacaacctggcatctctatatgctgcgaatgccaagcgggatgctgtacaccgggatcacgacagacgtcgcccggcgagcggcgcagcatcaggccggtaaaggggccaaagccctacgtggcaaaggggagctggaactggtatttcactgtcaggtgggggatcgctcaatggcgttgcggctggagtatcgggtgaagcagttgagcaaaaagcaaaaagaggagctgatagttaatccgcccctctcattggaatacctactgccggtagttaaaagcgactaaagggcgcagaatactccaccagcccattcacaccgctcagtgcatcttccgccaacggataaacctggaatgcggcttccgttcctggccagcggcaatgcagatcgaactgggcagccgttttaaagccgaaacgcccgtagtaagccggttcgcccagcaccaccacggcggcatagccgaactcattcagcgcatccagcccttcgtaaaccagcttttctgccagcccttggcgacgcaggctttcctctactgccaacggcgcgagtccaacccattggcgatcttcgcccgcaacgtcaaccgggctgaaagcggcataaccgaccactccaccctcttcgtcggtagcaacgatgcccagcgtcaacaacccgtcttcacgcagttgttgcaccagatcggcttcgtcatcacggccaaaggcgttacgcagcagtgcatcaatacctgcggcatccaccggaatttcaacgcggatcaacatggctgcggcacacgggaagtttgcgccgtgccctcctgcaaaccggcttccacaaagtccgctaatcgcagcaacccaacgcgtaacggcgtaggcatcgcatccagatcgatagcgtccatcagattttttacatacaggcccaattcggtatctccttcaatctgcaaccgacgctggaaaaacagcgtgtcgggatcttgcttgcgtgccgcaatcaaaatcagatcgttggcttcgccgctgaagctgacgtctgcctcagcctgttggctcaccaccagcctatcgttttctaccgtcataaaccattgcagtgccagatcgcgtacttcaatcttcaaccagcgcgattcgagaaattctaaatccccctcagccagcgcctgacggaactgccagctaagcacctgttgcaaaacctgacgctgcagagcaaacggcgtgaattttaacggtacgcgcaacagcgacggcccttgacgcacaatacgtgctcgtagtttttccaacactgttattcactcctttccactcagtctgaggttattttgccacattgcggctacgcgtaaccggtctatatcaacaaatggtgcaattaacgctcatcttgccctacagatttcaagttaccgcttgaatatcaatacgccagaagctgcctcaaatcaaagcttgttaacctcgggttcactaaaattgtctccccatttacatcattgccaggcgaatcaatggcccggcaacgtttatcacagcgtatacctggccaggtgtatagctggaatcaggatagatctatggagctgctttgccccgctggcaacctgccggccttgaaagccgcggtggataatggcgcagatgccgtttacatcggcctgaaagacgataccaatgcgcgccactttgccgggctgaactttaccgagaagaagctgcaggaagcggcagactatgtgcaccggcatggccgcaagctacatatcgccatcaacacctttgctcaccccgatggctacgcccgctggcagagagccgtggatatggccgcccagttgggtgccgacgcgctgatcctggcagatttggcaatgctggagtacgcagcggaacgttatccgcaggtggagcgccatgtttcggtgcaagcctctgcgaccaatgaagaagccatccgtttttatcaacgccactttgatgtggcccgcgtggtgctaccgcgcgtgctgtcgatgcaccaagtgaagcaattatcgcgcaccagcccggtgccgttggaagtgttcgcctttggcagcctgtgcatcatggccgaggggcggtgttatctctcctcttatctgaccggggaatcgcctaacaccgtgggcgcctgctcaccagcccgctttgtacgctggcaacaaacgccacaagggatggaatctcgcctgaatgacgtgctgatcgatcgctatcaggacggcgaaaacgccggttacccaacgctgtgcaaaggccgctatctggtggataacgtgctctatcacccgctggaagaacccaccagcctgaatacgctggagctgctgccggagctactggctgccaatattgcctcggtgaagattgaaggccgtcaacgcagccctgcctatgtcagccaggttgcgcgcgtctggcgccaggccatagatcgctgtatggccaacccggctggctatcaagccgacgccgcctggatggaaacgctcggcgcaatgtccgaaggtacccagaccacgcttggcgcgtaccaccgcaaatggcagtaggagaaaccatgaaatatgcattaggcccggtgctctactactggccaaacagcgagatagaggccttttatcagcaggcgatgagcagcagtgccgatatcatctatcttggcgaaagcgtctgcaccaaacggcgtgagatgaaagtagctgactggctggcgctggcacaggagatcgccaaatctggcaagcaggtggtaatttccactttggctttgctacaggcaccttcagagctgaatgagctgaagcgttatgtggagaatggcgaattcctgatcgaagccaacgaccttggtacggtgaatatggctgccgatcgcggtttgccgtttgtcgccgggcatgccctcaactgctacaacgcctacactctgcgcctgctacacaagcagggcatgatgcgctggtgcatgccggtagagctttcacgggactggctggtcaatttactgcagcaatgtgatgaactggggttccgccaaggatttgaagtggaagtgttgagttacggccatttaccactggcctattcggcgcgctgttttactgcccgctcagaaaaccggggcaaggatgaatgcgaaacctgctgcatcaaatatccgcaggggcgaatcgtcaattctcaagagaaccaacaggtgtttgtgctcaacggtatccagaccatgagcggctactgctacaacctgggcaacgaactgaccagtatgcagggggtggtggatattgtacgtctgtcgccacagggcatcgaaacactggcggtgctcgacagcttccgggctaatgagcaaggcaagcagccactgacgttaaccgaccatgccgaatgcaacggctactggcggcgcgtagccgggctggaactggtgcagtaatcactatggggccagcattctggccccatgattatcaggaagtccgacgtttacgaaatagattacgcagccccacgcggttacgcacggctccaacgccaataccaatcagcgtataaatcgcccccaataacagcagcatggcgacgtccccgccgacatcacgcagcgatagccccatctgattcacgccagcaatggctttggtcgcccaggttgaggggatcatcgaggagatcgccctgacccactgcggcatcgcttgcagcggccagatggtaccggaaaggtaaaacaccggggtggtgataaacgacagcgtcaggtagatcatctccacgctgcgcaagcattcggtcaccagcttgcctagcccaagcaccgcaagcaggaacgggaaggtcagcagcaagatctcggggattgctgcagtctgacgatagcccaagacccagggccacaacacaaataacacaatcgacaagaacagccagatcggcaacagggccgatagcccccccagataaacaggaagcgacggcttaccgcccggcgttcctttcaacacaatgctgacgcgcacgcaggcgatcagcagcgagtgctgcaataacatcaccaacaaacctgggaagataatcgccgcaaagctgatgccggggttaaatacgtctagcgtttggccttggatcggcatcagtatgacctgggcttgccgttcgctgaaaccactgcgcatcaacagtgaggtgttgtactggccgagcaactgctggtaggccgccactacgtcctgctggatctggccgttcgccagccggttggtggcatcaccgaacaccgggatctcgatgtttttgccgttgaggatcttcttctccagatccaccggcatgatgatcaccgcaaacagtttgcgccaacccagatcgcgtttcgcctcatccaggctgtcgtaggtttggatggcgatcttcggggtggcatccaactggcggataagctggcggctggcggtgctgtgatcctgatcgatcacccccaccggtagatcccacacggtgcggttggcataaaccatgctcatgatgcacagcgacaggatcagcatcagccacatcggccgttccaacatgctcgtcaatactttgcggaaagtgagccaatagcttttcatcccaccgtctcctcttttgccagccgcttcagcagccgtttacgcaccaacagtgcggtcaccaacgggtagaccactaacagcgcacatacgctgaggatggcgctggcgggcacctgccgcaggaagacgtcgaacatggcgtacagcgcgtgggtaagaggctcgatattggaaataatgcgcgccggtagcggcatggaaagctcgggcactgccatgccagagaaagtcagtgcaatgctcaccaacatgccaatcagggtgtaggcggtaatggcactgccggtaaaggtatacagcaacaggccgatgctttgtgccgccatcacgtagaagaagccaatcatcagcataaacagcgggttcccgctgacgcgagcgtcaaaaatgcccaccagcgcggcaatctctaccatcagcaaggtagtaaagcacagagtatagggagccagtttccccaacagtgccagactaaagggtttggctttcagcaaagatttactgcgtgccatcacgtaaatcatgcaggtaactacaaacagctgcagcatatgaatggtggcggcaaactgctgataatagatataactgccgctggcattgaacaggctgccgtagttgagagtgacatccgccagcggcggcagcgacttgcccatggccccggcaatgatcgagcggtaattggcgttggcctcagccatcaggccgctgaaatcctgagtagaatacagcccagcaccgtaaaacagcgcgttgtaatagagcaccacgctcggctgattgcccgccagcgcgtccgcctcaaaatcggccgggatagacagtaaagcataatcttgcgcgctacgcagacggcgcaacgactcatcaagaccgccgtcataggcttgcacatgggcatgagaacccgcatccagcttgcggatcaggtttttggatagcgggctgtgatcgttatccaccaccgaaaccggcagatcgagcaaggtcccttccgagaagttactgctgatcaggccaaacaggatcaacgggaagatccaccccagccagtgaaccaccggccggcgaaaagcgatgcggcactcgttactgaacgcgtggctgaagcagcgccagcctgcccttactctttccattgccataaggtgctcatccctgggcgcaggccatctatcggctgcgacggatacaaacgaacttcaaaggttttcagatcaaagtcaccggtcgctcgtgtggcacgcttggtggcgtaatcccccaacggggcgatatagcgcacttcggcctcgatcgtttggtctttcaacgctgggacgcgcagttggaccttatcccccttgcggacgtgagccagaatatcttcccgcaggttaaacacgaaataggcatccggtacgcggatcagcgtcatcaatgggctagaggcgttgagcagctcaccgacttcagccgggatcggccccacttcgccatcaaccggagctttaaccaggagatcgtcggtctgggcctgaatttctagcagatcttgttcagtcgcccgcagggcagcttcatatttctgccgcagttcgatgcgatcgccattgatgccttcgtccaaattggctttggcagcctgcacctgttgataggcggtatcacgcgcacggcgtgaactgtccaactcagatttggatacgtagcctttgctggcgacgctcaggttacggtcgtaatcgtgttgggcattctggtattgcgcctcggcctgtgccaggttggcgcgcaggttacggatgctttcttcacgggtgccatgcagcgattcatccaactgcgcttgggcctcatcccgcgaagcctgtgccgaacgtagctgggccatcagttctggactctccagccgcagcagcagttgcccggtattcacatcgtccccacgctctaccaggcgctctatcacccggcccttggctttggaagcgacgatcacttcgggggcatccacttcgccctgcaacaacaaatcctgattatgcgcgcggaatagcaccgccatggcgatagctatccccattagcagcagggtaaacagcgtcttctttttcattacttcagccccttgaacatcagcgtgcaaacaaaaaccatcatagctgtaaaaaacccattattctcataaggatattgcgagcacatatatccccttttataaccgtattttcgattatgcttttaacacaaaaagcataatcgcttttttagttgcagatccctgcaatcgccctttaagcgatcaacctgataagcacaatggacgatgaaatgactgaacacacacgggtaccactttcggtactggatttatccccgatccctcagggagccaaggcgcgcgacgcatttcactgctcgctggatttggcgcaacatgccgaaaagtggggctatcagcgctactggctagcggaacaccacaatatgaccggcatcggcagtgcggcgacgtcggtattactcggttatttagcctccggcacccagagcattcgcctcggttcaggcggcgtgatgctgccaaaccatgcgccgctggtgatcgccgaacagttcggcactttggagtcactttatcctgggcgtatcgatctgggtcttggccgagcaccgggtaccgaccagcgcaccatgatggcactgcgacgccacctctcaggcgaggtagacaacttcccgcgtgacgtacaggaactgcaacattactttggcgaagtacaaccggggcaagcggtacaggccgtgccgggccaagggctacatgtaccaatctggctgttgggctccagcctgtacagcgcacaattggcggcacagctcggcctgccgtttgccttcgcctcgcactttgcgccagatatgctgttccaggcactgaatgtgtaccgtgagaactttacgccgtctgagcagtgccagcagccacacgcaatggtgtgtgtcaacgtggtcgccgcagacagcgaccaaaacgcccgcttcctgtttacctccatgcagcagcagtttatcaacctgcgccgtggctcgcctggtcctctgccgccgccggtcgataatatccacgcgctgtggaccgcaggcgagcagtatggcgtggatcaggctctgcgcatgtcgatcgtcggtagcgaaagcaccatccgccatggcctgcaaagcctgttgcgcgagacggcagcggatgagatcatggttaacggccagattttcgatcatcaggcacgtttacggtcgtttgagattgttgccggggtgaaaggcgatttagtgaagggataggggttacatattggtgacgcccctcaccctaaccctctcccacagggagagggaaccgatcgagtatgtttgaaattagtgtgattcaccttggatgagaaagcgaccgagtttgccgagattgtattgactcaccttgaatgaggagacgatcgagtttgctgggattatctctttactgccaaacgagcaggggctatcagctccctctcccttcgggagagggttggggtgagggggctcagcgctggatcaggtagcgaatggttggcccatcctgctgaatatccagcaccttgtagccatggttacgggcatcgagcgggatattattgatcgactgcgggcagtcgctgatcacttccagtatttcgcccggtttcagctgcggcatagcctctaacgtggccaccgccggataaggacaaggctctcccaccatatccaaccggtaatccggcacgatctcggtctgtttcatacttcactccttaagttcaccacctgcgcatctggcttggcacggaaaaagcgtttctcccaccacagcatcgcggcaaaggcgatggccagcagcagataggtcaccagcaaaccaccgatcggcccgaaggtgtctagcaggttaatcttgtcgtagttggtcgccaaggttggcgccagatcgtcccagtagtaggctaacagcgtggcgccgataatgttgcccaaccccacccaccagtaatggacctgtccttccaccgcacgatacatccaaccggtttcgcagccgccagccagcacaataccgaagccaaacagcaggccgcccagtaccgcgttgggtccggcccacatgatcttcggcgaaacgcccagttgcacatagctgaagatgccgatggcgctgaccgccatgccgataatgatcgctttagccatatgcgtacggcctgtgatccacagatcgcggaacgccgaggtaaagcagatctgcgcccgttcaatcagcaggccaaaaccgataccaaacagcatggcgataccgagtttcggcgcatcaaacagcgtccataatgaccaagccaccatgaggcagaaaaccaccattcccaaacggaaacgacggcgtgcctgctcaggtttttgcgtcaacggtgaggccgctttcactctttgcagcttgaccggaatacggaacatcggcagcaaggtgaatttggcaccgaagtaagaaccggccgccgttgccagcgcaaaaaaccaggcatgtagcgagaactgtggaataccggtaaagaaggccgccaggttacaccccatcgctaaacgcgcgccaaaaccggcaataatgccgcccagcagcgcttgtgcaatgcggatgcggtgctgcggcatacgtaatttgatgttattggcccacagcgcggcggcgatgcaacctgcaaacatgccgataatcatgcgcccatcgatacgatcgagtggtgtgccctgtaggccgatcaccttaaagtagccccactgctcgggatgaaagccaaaccactgcaagatatggcccccccaacgggtaaattcgccggttaccgcccagaaggtaccggtcatgccgaaatagtaggtcgaaaggatcccggctgcgatcaccgccggtaagggtgcccaaaagcgcaccaggtattgagatttgaattgttgccagttcacggcagctcctgtgcatccgtaagataaaccttgcgaatgatacgccctttagcagtattaactgagataccaggcaaaaaaaaaccagtccgaagactggtttttaagctgattaaccgtaaacggtcaaatcaatggttatgcatcaccgaaacggcgacgtggtgcggcaggagctgctgcatcgtcacgacgtggtgctggcttgtcacggttgaagttaccgccacggcgttcgccaccggcagcattaccgccttcacgacgctcaccgaaagaacgacgtggtgctggtgcaccttcgcgacgctcgccgttgaatggacgggcaccgccacggcgctcaccaccgttaccaccggcaggacgctcacgacgttcatgcggctgtgcatcgcccagcagttgcatgttcatcggcttgttcagaatgcgggtgcgagtgaagtgattcaggatctcgcccggcataccttttggcagctcaatggtggagtgggaagcaaacagcttgatgttaccgatgtaacggctgctgatgtcaccttcgttagcgatcgcgccaactatatgacgaacttccacgccgtcatcacggccaacttcaatgcggtacagctgcatttcacccacgtcacggcgttcgcgacgtggacgctcagcaccagcttcacggctgtctggacgtgcatcacgacgacggtcgctaccacgttcgtcacgatcgttgaactcacgacgttgacgtggtttgaacactggatctggtggcaggatcagaggacgttcgccctgtgccattttcagcagtgcagcggccagcgtttccatatccaggtcttcacccggctgcagcttagccagcagcgcacggtacatatccagatcgctgctttccagttgctgctgaactttagcggcgaacttggccaggcggcgctcacccagcagatctgcgtttggcagttctacttcagggatggtcagcttcatggtgcgttcgatgttacgcagcaggcggcgttcgcggttttctacgaacagcagcgcgcggccagcacggccagcacggccggtacggccgatacggtgaacgtaagactctgaatccatagggatatcatagtttacgaccaggctgatacgctcaacgtccaggccacgagcggcaacgtcagtggcgatcagaatatccagacggccactcttcagacgctccagggtctgctcacgcagcgcctggttcatgtcaccgttcagtgcggcgctgttgtaaccactgcgctccagcgcttcggccacttccagggtcgcatttttggtacgtacgaagatgatcgccgcgtcaaagtcttcagcttccaggaaacgcaccagcgcttcgtttttacgcatgccctgcacggtccagtagctctggctaatgtccggacgagtggtgatgctggactgaatgcgcacttcctgtggatctttcatgaagcgacgggtaatacgacggatcgcttccggcatggtcgcagagaacagcgcggtctgatgttcagccgggatctcagccatgatggtttctacgtcttcgataaagcccatgcgcagcatttcgtcggcttcgtccagaaccaggcctttcaggccagaaaggttcagggtgccacgtttcaggtggtccagcagacggcccggagtccctactacgatttgcgggccctgacgcagagcgcgcagctgcacgtcataacgttggccaccgtacagggccaccacgttaacgccatgcatgtgcttggagaaatcggtcatggcttcagcgacctgaaccgccagttcgcgggttggagccagtaccaggatttgtggtgctttcagggctgcatcgaggttgtgcagcaggggcagcgagaacgccgcagttttaccactaccggtctgcgccatgcccagcacgtcgcggccgttcaacaggtgaggaatacactcagcctggatcggtgatggtttttcgtagcccagatcggtcagggcagcaatgatcggagcagacagccccaggtcagcaaaagaggtttcaagctcagtagtcatgtacacgtgcctcattaataatggcagccagtctacataactcgtcgagaaaattttcagtcattttcattgaaaagtgtgaaccggctcaaattagattataaaacagacaaaaaagccctcgcccgttaaggcgattactttggtcaaaaaaccaatgtaaatcaggctgataagtgtccgtcagctattgctggtccgattccgataggtcgtcttgttcttggcccaacagcgccaattccaacaatgcatagcggtgctcaacaaagttatgaacgttgttagccaccgtcagtttgaacagcgccgaagcggtgtccttgtcccccagacttaggtagtgcttacctaaatagaagtcagtttcactgagatgctcagcgagcgaagtgttatccgttgcatctgccttgaggcgttccatcagcgttttttcgctgattttgcccaggtagaattcgacaatattccatccccattgccctctgtccgctttgtcataacgctgctggagcgctacatcggccttcttggcatcgatttctctctccgccaggtaaagccacaacgaacggaagggatcgtttgggtcgtcttgataaaacgcctgcagatcatcctgcgccaacgggaagcggccgccataatacagtgcgatgccccggtttaaacgcgcgtaattgtaagttggatcaagctctagtacagaatcaaacgcttcataggcagcatcaaaattgcctgcctgcgttaagtaaatgcccaggtagttgaaaacttctggcatatcaggacgtatcgctagcgcttgtgaaaagtcattgcgcgctagtgcacgtaaaccaagactatcatacagcacaccgcgctcatataaaagctgcgctcgctcatcatccgttaatgcccggctggcaagtatttgttccatgcgcgccaggatcacttcctgctgcagcgtaggctgcaacggaatagccagaacttcgtctttacgccaatcatggttgctgcatcctgccagcaatagtgctgtcgcaacgtaacaccagcgcaagaaaggcttcatttcccactcccgaagacaaacattggatgaacgtcctgtcctccgcttgctaatacgcgagtatcctacccacgtgataaggacagcccccagccctaacggcagggagctgtaaaactgctgatacagttattctgcttctggtgcaggagccgcagcggattctggcgctgtagcttctttgatgctcagacgcacacggccctggcgatcaacttccagtaccttaaccggcacttcctgacccatcttcagatagtcggtcactttctcaacgcgcttgtcggcgatttgagagatgtgcaccaggccttctttaccgccgccgatggccacgaaggcaccaaaatcaacgatacgggtcactttaccctgatacacacggccaacttcgatctcagcggtgatctcttcgatgcggcggatagcgaacttcgctttgtcgccatcggttgcagcaatcttcactgtaccgtcatcttcaatttcgatcgtggtgccggtctcttcggtcaacgcacggatgactgagccacctttaccgatcacatctttgatcttgtctggattgatcttgatggtgtgaatacgtggtgcgaactcagagatatcgccacgcggcgtactgatagcctgttccatcacgcccagaatgtgcaaacgggcacccttggcctggttcagagccacctgcatgatttcgcgggtgataccttcaattttaatgtccatctgcagcgcggtgataccttcacggctaccggccactttgaagtccatgtcgcccaggtgatcttcgtcacccagaatatcagacagaacaacaaagttttcttcttctttcaccaggcccattgcgatacccgcaacggcagccttgattggcacgcctgcgtccatcagtgccagagaagcaccacaaacggaagccattgaagaagaaccgttggattcggtgatttcagacaccacacgtacggtgtacgggaaatcttctggtttaggcatcatagctaaaacgccacgttttgccagacgaccatgaccgatttcacgacgcttcggtgaacctaccatgccggtttcaccaacagagtacggagggaagttgtagtggaacaggaagctgtcggttttctcgcccatcagctcgtcgatgttctgtgcgtcacgtgcggtacccagagtggcggtaaccagtgcctgagtttcaccacgggtgaacagtgcggaaccgtgggtacgtggcagaacgccagtgcgcacgtccagaccacggatcatgtctttctcacggccatcgatacgcggctcgccacgcagcacacggctacgtacgacgtttttctcaacggtgcccaggatgtcctgaatttcagacgcgtccagagtttcgtcttgcgccagcagagtttccactacgctgtctttgattgcatcaacctgagcgtaacgctcttgtttttcggtgatgtggtaagcatcgcccagacggctttcggccagctcggctacgcgcgcatgcagcgcttcgttaaccgctggtgcctgccaatcccacttcggcttgcctgcttcggcaaccagagcgttaatgttttcgataacgatttgctgttggtcatggccaaacaccactgcgcccagcatctgatcttcgctcagcacatcagcttcggattccaccatcagcaccgcgcctgctgtaccggcaaccaccaggtccagacggctttctttcagctcgtcggtggttgggttcagtacgtactgatcgttgatgtaacccacgcgtgcagaaccgattgggccattgaacggaataccggacaggctcagagccgcagaggcaccgatcatcgctacgatgtctgggttcacctgtgggttcacggaaaccacggtggcgatcacttgcacttcgttcaggaagctatctgggaacagtgggcggatcggacggtcgatcagacgggaagtcagggtttcgccttcgctcggacggccttcacgacggaagaagctacccgggatacggccagcagcataggtacgctcctgatagttcacggtcagagggaagaagctctggcctggtttggctttcttttggcctactacggtgacgaatactgcggtgtcatccatgctcaccatcacggcggcagtggcttgacgtgccatcataccggtttcaagcgtcacggtgtgttggccatactggaatttgcgaataatcggagtcagcaaaatttaatccttaattggtggcgcgcaatcgttcttcgactcgacacgcctgtggttcactgaccttctcactacatcctcgcgactaatgacaatccttatctctcatgagataaagcctctcattagccgcgcgaacctctgtaacggaagatcctcagtaatacattaacctgatttgcttatgcttcctagaagaaaggggccaaattaggcccctttctactgaaacttgctcgattagcgacgcagacccagacgctcgatcaggctggtataacgtgctacatctttacgcttcaggtagtccagcagcttacgacgctgagaaaccatacgcagcagaccacgacggctgtggtgatcttttttgtgctctgagaagtggccttgcagatggttgatctgcgcagtcaacagggcaacctgaacttcggtagaaccgctgtcgttagtaccacgaccgaagtcagctacgattttagctttagcttcaacacttagagacattgtcatactccaaaattatagataataaatacaggcgccgatctctaattcagcaacccaatgcataagctgcgccattctactcttagcgcagggcgatcgcaaggcgggcaggtcagtcgaaatattcgacaaccaggcggcgcggtgcgactcggccatcatcggcaatctcgccaatgccgataaatttacgttcttcgccttcggtaatgcgcaccagacccgaggccggagcccctgcggcctgcaccggctgcccttgtttgacgtaacccgctaccgctggcaacaggttcacctcagggaaatcttcggccgggctgtccatcggcatcagcaacggatcgagcagttcgcttggcgcaatgttctgctcctgtgcctgctccactaacgcatttagctgttccagcgtgatcatgcgggcgatcgggtacttcgccacctgcaggcggcgcagataaatcacgtgcgctccacagcccagcagttcaccgaggtcatccgtaatagtgcggatgtaagtgcctttcgagcagtgaatttccagctcaagctcatccccttcccagcggataaactgcaactcatacacggtgatgctgcgtgcttcacgcgggacttcgataccctggcgagcatattcgtacagctttttgccctggtatttcagtgcggaatacatcgacggcacctgctggatgttacccctgaaggtgtccagtgcggtatcgagctgcgcctgggtgaagtttaccggccgctcctgcacgatctggccatcggcatccgaggtgtccgtgcgctggcccaaacgggcaatcacacggtaacgcttgtcggaatcgagcaggtactgggagaacttggtggcctcacccagacagattggcagcataccggtcgccagtggatcgagcgcgccagtatggcccgcgcggttggcattatagatacgctttactttttgcagggcatcgttagacgacaggccctgcggtttgtccagcagcagtacaccgtgaatgtcacggccgcgacggcgagggcgactcattaagcctcctcttcatcgcctgatgcattgcgacgttcggcatcgttcttcactacgttggtcaccaggttggacatgcgcatgccttcaaccagtgagttatcgtaggagaaggtcagttccggcactacgcgcaggcgcatcgctttgcccagcagcgtacggatatagccagaggcatcctgcaacgctttaatgccgttggtcaccagatccggatcgtggttttcagtcagcacgttcaggaaggtgacgtaaactttggcgtaagccagatcgcgagacacttcaacacctgaaacggtagccatgccgacacgcggatctttgacttcacgctgcaagatcatcgcaatctctttttgcatttcttgtgccacgcgttgaccgcggctgaattcttttgccatttggaaaccctccagacaaatcggggggcacaaggcccccctaaaacagatttaagcgtttttcgaggcttaagcgatggtacgctggatctcgatgatttcgaacacttcgatcatgtcgccaacgcgcacgtcgttgtagttcttaacgccgataccacattccataccgttacggacttcgttaacgtcatctttgaagcggcgcagggattccagctcgccttcatagataaccacgttgtcacgcagcacgcggattgggttgtgacgcttgatgttgccttcggtcaccatacagccggcaacagcgccgaacttaggtgatttgaacacatcacgtacttcagccagaccgatgatctgctgtttgtactcaggcgccaacataccgctcatcgcctgcttcacttcgtcgatcaggttatagatcacggagtagtaacgcagatccaggctttctgactcaatcacgcggcgggcagaagcatccgcacgcacgttgaagcccaggatgatggcgttggatgccgcagccagggttgcgtcggtttcggtgataccacctacgccagaacccacaatcttcaccttcacttcatcggtggagagtttctgcagtgaatcggaaatcgcttcacaggtaccctgtacgtcggttttcagcacgatgttcagttcagaaacttcaccttcggtcatgttcgcgaacatgttctccagtttagatttctgctggcgagccagtttaacttcgcggaacttgccttgacggtacagcgcaacttcacgcgctttcttctcgtcacgcacgacggtcgcttcgtcacccgcagcaggaacgctggacaggcccaggatctcaactgggatagaaggacccgcagaggtcacttcacggcccaattcgtcacgcatcgcacgaacacggccatactcgaagccgcacaggacgatatcgcccttgttcagcgtcccttcctgtaccagtacggtagccactgggccacggcctttatccaggaaggattcgattaccacaccgctcgccatgccgctacgaaccgctttcagttcaagaacttcggcctgcagcaggatagcattcaacagttcgtcgataccggtaccggctttcgcagatacgtggacgaactgagcttcaccgccccactcttctggcataacgccatactgagacagctcttgcttaacgcggtccggatcggcttctggtttgtcaattttgttaaccgcaaccaccaatggcactttagccgcctgagcatgctgaatggcttcgatggtttgtggcatcacgccgtcgtctgctgctacgaccagaaccacgatatcggtcgcctgagcaccacgagcacgcattgaggtaaacgctgcgtggcctggggtatccaggaaggtgatcatgccgttttcggtttctacgtggtaagcaccgatgtgctgggtaataccacctgcttcgccaaccgccaccttggtggagcggatgtagtcgagcagagaggttttaccatggtcaacgtggcccatgatggtcacgactggcgcacgagactcggcgcccgcgccggtgtcacggtcgctcatcagcgcttcttccagctcgttctcacgacgcaggataactttgtggcccatctcttcggcaaccagctgtgcggtttcctggtcgatgacctggttgatggtggccatagcgcccagcttcatcatcgctttgatgacctgagaaccttttaccgccatcttgttagccagttcggcaacggtgatggtctcgccgatcaccacgtcacggttaaccacctgagccggcttgttaaagccctgctgcagggtgcttggcttacgcttgcctttaccgccacgggtcatggtacgagcttcttcgcggtctgctttagactcggagagcttgttgcctttcttctgtttggtcgctttgccaccgcgagtacggctacggcgctcaccttcaactttggcgtcgttttcgtcttcggcagcacgagcgtgctcggaggtggttacgtggtagtcggctgtttcaaccgcagcacttgctgcttcggcttcggcccacttctcaccgttttcttcggccatacggcgcgcttcttccgctacgcgtttggcatcttcttccaccttacggcgtacttcttcttccgctttacgtttcagttcggcggcttcggcttcacggcgtgctttttctgcctgagctggcttggtcatttcgtcggtatgttgattggtcactttttctttttccgctgaattacgcttagcaatctccgcggcctcacgtttggcttgctcttcggctgcgcgcttagcttctgcttcgcgtttcgctagctcttccgcttcgcgccttgcctgctcttccgcttcacgctgtgcctgctcagccgcttcagcctgttgggcttcctgcggatcgcgatttacataagtgcgtttcttgcggacctcaatttgcaccgatttactcttaccgccggtgctcggaatattcaaggtgctgcgcgttttgcgctgcaacgtgagtttgcctggcgcactaccgtgttcacggttcaggtgcgccagtaaggtttctttctcatgctgtgtcacagagtcggtctcagacttgttgatccctgcatcagcaaactgctgtaccaggcgatcaaccggtgtctgtatctctgctgccagcgattttacggttacatctgtcgtcatgctgttccttcctgctacagttattacgcgttgtcgccaaaccaacagatattacgtgcggccataatcagctcgccggcttgctcatcgctaagcccttcaatatcagccagatcgtcaacaccctgctcggcaagatcttccagcgtacaaaccccacgcgcggccagtttaaaggccatgctgcgctcaagacccggaaggttgagcaaatcatcagcaggtttttggtcgcccaggctttcttcctgtgccagggccagcgtggtcaatgcagctttggcgcgatcgcgcaacgcttcaaccatatcttcatccagaccgtcgatttccagcagctctttgattggcacgtaagccagttcttccagagtagagaagccttcttcgaccagaacggtggcgaaatcttcgtcgatatcaagatacttggtgaaggtatcaatggcggcatgagcctcggcctgatgcttggcctgcagatcgtccgccgtcatcacgttcagttcccagcgatcatcatcacgatgctgtttcaacagttgggaagctaaacgcacgttttggccattacggccgatcgcctgtgccaggttgctggcttcaacggcgatgtccatcgtgcaccggtcttcatctaccacgatcgaggcaacatctgccggggccatggcgttaatgacgaactgtgcagggttatcatcccacaggatgatatcaatacgttccccgccaagctcgctcgaaacggcctggacgcgggcaccgcgcataccgacacaggcaccgaccgggtcgatacgcttgtcgttggttttcacggcaatttttgcacgggagccaggatcgcgggctgccgctttaatctcaatcacttcttcgccaatttccggcacttcgatgcggaacagctctttgagcatatccgggctggaacggctgacgaacagttgcgcaccgcgtgcttccggacgtactgcgtacagtacaccgcggatacggtcacccgggcggaagttttcgcgtggcagcatgtcttcacggccaatgaccgcttcggcgttgctacccagatccagcgcaatgctgtcacggttaacttttttcaccacgccggtgacgatctcaccttcgtgttggcggaaggcgtcaaccaccatcgcgcgctcggcttcacgtactttctgtacgataacctgctttgccgtttgagtggtgatacggtcgaaggtcacagattcgatctgatcttcgatatagccgcccagttccatggacggatcttcatactgtgcagcttccagcgtgatctcacgcgttggctgggtcacttcatcaacggcaacccaacggcggaaggtgtcgaaatcgccagtcttacggtcaatgctgacacggacctcgatttcctgctcatattttttcttggtggcggtggctaaagcggtttccagggcttcgaaaatcttctcacgtggtagggatttttcattggaaactgcttcaacaacagccagaatctctttgttcatcctagttgcctcatccaaactttaaaagtggggtaccaggttcgctttctgaatattgctcagcgcgaacacttcatctttcccatccacagtaaccgtgatcatctcgccttctacagacttgatgatgccctgccatttgcggcggttttgtatcgccatacgcagaacaacgctgacttcttcaccgagaaaacgttgatagtgttccgcggtaaacatagggcgctcaaggccaggagaggagacttccaggttgtaagcgaccgtgatcggatcttcgacgtccagtacagcgctgacctggtggctgacatcagcgcaatcatcaacattgattccgttgtcactatcaatatagatgcgtagtgtcgattggcgcgcccgaataaattcgatgcctacgagctcaaagcccaacgcctctaccggtgcggaaagcatctctgttaatttttgctctaatgtggacaagcccacccccaagacataaaaaaagggcctaatagcccagtgattctgttgccaaataacaaaaaaccccgaaaattcggggctttatgcaactggaccctgtttgccgcaaagcggcttcggtgcaactttctagcaagtgtcattttcaaatgttgatcgagaaaagcggaattcaatcgaaaagtgtatttgaaaataaacacttaaaggaaagtggttgcgggggccggatttgaaccgacgaccttcgggttatgagcccgacgagctaccaggctgctccaccccgcgtccgaaaacgtggcaaatattacgccgataattgcaaaaacgcaagttatctctgggatttggtaccgaggatgggactcgaacccacaagcccgttagggcactaccacctcaaggtagcgtgtctaccaattccaccacctcggtactgatttttactgctaacggctgtttctattgaggtctaaaacaaccgctttcaaacttttcaggcttactgcgggatatcactgaccggtttagctggtgctgccggagtgctagtctgctcagtttgcgctggctgacccaggttttcccactcactgcctttcttgccctgattggtgctcaggttgcccaggatcagactgatgacgaagaacaacgtcgccagaacagccgtcatgcgggtcataaagttgcctgaaccggtcgatccgaagaacgtgccagaagcacctgctccgaatgaggctcccatatcagcgcctttaccttgctgtagcatgatcagagcgactagcccgatcgatatcagcaagaaaattaccagaagagcttcgtacatagtggtacctgtatccttgcgggttcaccgcgtgccaaatgcttctcaccccagatgcttccaaactaaagaaggcgtggcgtgtcactaaaacagcccactgaagcgggtgtgaatactaaccaaagccatcaaagcgcgcaagggcattttgcacccgccgatgcgtttgcggaaaaaaacagcaaaaacagggctgatcgggaaattacgcaggcactgacaacgtacctgcgtaaaaacagcgtgttaacctgccagcttgaccgcatcggcaatacggtgcgccagcgcgataacctgctgttcatcttcgccttccaccatcacgcggatcagcggttcagtacccgatttacgcagcagcacgcggccacgaccggccaattcggcttcaacctgctcagcgaccttcaacaccgcctctgactccagtgggttatgctcaccgacaaagcgcacgttgacaaggatctgtggcagtaatttcataccgctgcacaggtcgtgcaggctcatgttattgcgcacgatcgccgtcaacacttgcaggccagcgacgataccgtccccggtggtggttttgtccaacaggatcacatggccagagttttccgccccaatgcgccagcccagctcttgcagtttttccagtacatagcggtcccccaccttggcacgagcaaacgggatgccgagctgcttcaatgccagctccaggcccatgttactcattagggtacccacggcaccgccgcgcagttgcccctggcgcaggccttcacgagcgatgatgtagaggatctgatcgccatcgaccttgttacccagatgatccaccatcatcacgcggtcgccatcgccatcaaaggccaagcccacgtgcgccttctcttctagcacgcgcgcctgcagttggcgtacatcagtagcgccacactcttcgttgatgttcatgccatccggctcacagccgatagcgatcaccgtggcacccagctcacgcaaaacgcttggggcgatgtgataggtagcaccgttggcgcagtccaccacgatcttcagcccgttcagactcagttcgctcgggaaggtgcctttacagaattcgatatagcgccctgcggcatcaacaatgcggctggctttacccaactcggcagattcgacgcaggtcagcggtttttccatttccgcttcaatcgcttcttccacatcgtctggcagtttggcgccgtcgatggaaaagaatttgatgccgttatcgtaaaatgggttatgtgaggcagaaatcactatcccggcttccgcacgaaaagttcgagtcagataagccaccgccggggttggcatcgggccggtaaacgaagcggacagccccgccgcggctaaaccggcctccaacgctgactccagcatatagccagagatacgggtatctttaccgatgatgattttgcgggagccatggcgcgccaataccttgccggccgcccaacctaacttgaggacgaactctggggttatcgggctgtcacccactttgccacgaatgccgtcggtaccaaagtatttgcgttcgctcatgtctctactatcccttagctgaaagtgttgcctcgacgacacgcatcgcctcgacggtttctttgacatcatgcactctgactatctgcgccccctgcatcgcggcaataaccgcacaggcaacgctgccaatcacccgctgttcgggtggaacattcaatagctgcccaatcatcgacttacgcgacatccccaccagcagtggcaagccaaagtgatgaaattccgccaatcgggccagaagctgataattatgcgctaaattcttaccgaaaccgaagcctgggtcgagtaacaatttctgttttgctatgccacctgcaatgcagcggtcaatatgctgctggaaaaacgcattaacgtccgccatcaggtcatcgtaatgcggtgcttgctgcatggtacgcggctcgccttgcatgtgcatcaggcaaacaggcagaccgctttcggcggcggccagcaacgcgccaggctcttgcagcgagcgaacgtcgttgatcagatgcgcaccggctttagcggattcgcggatcacaccggcttttgaggtatccactgagataaagatttcaaaccgctgcgccaaagcttcaactaccggcacgacgcgctcaatctcttcctcttcactgacctcagcagcgcccgggcgcgtggactcgccccccacatcgatcatcgttgcacccgccgaaatcagcgcatgcgcatgcagcagagcatcattcagagaattatgccgcccaccgtcagagaaggagtctggggtaacgttgaggatccccatcacccgaggatggttgagatcgaggatttggtcgcgcacggttaactgcatgattaatctaccttggagtcaatactactctgttgcctggagtggatcccgcccctcacacccaggagaggcggcaatttgcagccagcaataaaaaaccccggctggccggggttttattttacgctacagccgatattacttgtcgagctgttcagacatggtgttgcctgggtttggcgtacgcggctcatctaccggcgttggtgcttttggtgtgccaccattgtcggagttgttgcttttcgccacgtcgtcccaacctgctggcggacgcacatctttacggttcatcaggtcgtcgatctgcggtgcatcgatggtttcatatttcatcagtgcatctttcatcgaatgcaggatgtccatgttttccatcagcaacgcacgtgcgcgaatgtagttgcgctcaatcagggatttgacttcctggtcgatgatacgtgcggtttcgtccgacatgtgtttcgccttggccacggaacggcccaggaacacctcgccctcttcttccgcatacagcaatggccccagcttctcggagaagccccattgggtcaccatgttgcgggcgatcgaggtagcgactttaatgtcgttcgatgcaccggtagagactttttccggcccgtaaataatttcttctgccagacggccaccgtacagggtggagatttggctttccagcttctgacggctggcgctgatcgcatccccttccggcaggaagaaggtcacgccgagcgcacggccacgaggaataatcgtgactttatgcaccgggtcatgctcaggaaccaggcggccaatgatggcgtggcccgcttcgtgataggcggtcgattctttctgcgcttccgtcatcaccatggagcgacgttccgcacccatcatgatcttgtctttggctttttcgaactccaccatcgacaccacgcgcttgttgccacgtgctgcgaacagggccgcttcgttgaccaggttggccaagtccgcaccggagaagcccggagtaccacgtgcaagcacagaagcatcaacgtctggtgccaaaggcacgcgacgggagtgcaccttcaggatttgttcacggccacgcacgtctggcagcccaaccaccacttggcggtcgaaacggcctggacgcagtaacgccgggtccagtacgtcaggacggttagttgccgcgatgacgataatgccttcgttgccttcaaagccgtccatctcaaccagcatctggttcagcgtttgctcacgttcatcgtgaccaccgcccagacctgcgccacgttggcggcctacggcgtcgatttcatcgataaagatgatgcacggtgccgctttcttggcctgttcgaacatgtcacggacgcgggatgcacccacaccgacgaacatttcgacgaagtcagaacccgaaatggtgaagaacgggactttcgcctcgccggcaatcgctttcgccagcagggttttaccggtacccggagggccaaccatcagcacgcctttcgggatcttgccgcccagcttctggaaacggctcggttcgcgcaggtagtctaccagttcactcacttcttcttttgcttcatcacagcctgcaacgtcggcaaaagtggtcttgatctggtcttccgtcagcatacgggccttgctcttgccgaaggacatcgcgcccttgccgccgccgccctgcatttgccgcatgaagaagatccagaccccaatcaacaacagcattgggaaccaggaaataaagatagaagccagcaaacttggctcttccggtggctcaccaacaactttcacgtttttggttaacaacgtatccagtaacttcggatcgttgaccgggatgtaagtggtgtacttgttgctgtctttacggacaacgttgatttcacgcccattaatgcgcgcttcacggatctgatcttgggtcagttcggtcatgaaggtagagtaatctaccctacggccattagactcgctgggcccaaagctctggaataccgacatcaaaacgaccgcgatgactagccagagaattaggtttttcgccatgtcactcaagggattaacctcatattacaactgtgttaacaaacagcgttagggtactacagtttccgccctgtcgctacaatgtacacttcacgcgaacgtgcgcgagaagcgtctggcttacgaatcttaaccttcgtaaacagggagcgaatttcccgtaggtactcgtcaaaaccatctccctggaacaccttcaccaggaaactaccgcctggtgcgagaacatcacgacacatttccagtgctaattccaccagatacatcgattttgggatatcgaccgccggggtgccgctcatattcggggccatgtcagacatgactacctgaaccttactatcacctacacgttccaacagtgctttgaggaccagttcatcacgaaaatcgccctgaaggaaatcgacgccaacgataggatccattggcaaaatatcacaggcaatgatacgcccgttaccaccaatctgggttaccacatattgcgaccaaccgcccggtgcagcccccaaatcaacgaccgtcatccccggcttgaacagtttgtcactttgctgaatttcatcaagtttaaaccaggcacgcgaacgcagcccttttttctgcgcctgcagcacatatttatcgctaaagtgttcttggagccagcgactggaactggccgaacgctttttatttgccatcgagtattccaactatcctaaaaagagtctcatgccaggttcgcttctcacgtaaactcaattcggtgcagaccgatttggtgatacacatgagatggcggtagaatgtaccgttttcaatcccaacttaagcaaaaaagacaatgaatctgaataataaacaaaaacaacacctgaaaggcctggcacatccgttaaaaccggtggtcatgctgggtaataacggtctcaccgaaggggtgttggctgaaattgagctggctctggagcatcacgagctgatcaaagtaaaaattgcagccgaagatcgcgaaaccaaaaccctgatcgccgacgctattgtgcgtgaaacgggtgcctgcaatgtgcaagtgatcggcagtacgcttattctttaccgcccgtcgaaagagcgcaagatcactttgccacgctaatccgcaatctgtttgctgagacggtgccatgcgccgggctcagataaaaggccgcttgcggcctttttcctttctttacaaaaccctgctgaacttttaaccaactcgggcgaaattaaagatattccactttcagaatttcgtattctacatcaccacccggggttttgatgacaacaacatcatcctgctctttgccaatcaggccacgagccatcggtgagttgacagaaataagatttttcttaaagtctgcttcatcatcacccacgatgcggtaagtcacctgatcttcgctatccaggttcatcaccgagacggtagcaccaaaaatcacgcggccagtctgaggcattttggtgatgtcgatcacctgcgcattggacagtttggcctcgatttcctggatacgcccttcacagaaaccctgctgttcacgagcggcatggtactcggcgttttctttcaggtcaccgtgttcgcgtgcggtggcgatgtcggcaatgattttcgggcgacgcacacctttcaaatattctagttcttcacgcagttgttctgcgccaaacaaggtcatcgggatctgtttcatcgttaaatacctctaaatctatcctgttcaaatatacccgtggtgtagcaagctaagcgcagctcgacatccccagggcattagcgtcatcctgacgtgttcgtatgaaattacggcaggcgttgcgccttccgtctccaggcgataaacaaaagaaaccgagctcggaggtttgttccaagtcagcgtcgattttgcattttgatacgcattttagcctagagttccttaagggtcatcgtttactttatcccttgatgcaccgtagtatgacagcacgttatccagctgttaccccgagattatgcgtttttcacgaattgtcagtgtattggcctgcgcatttgctgttaatgcccatgcggccccggttgaagattacacacaatatttgcctgatggggcgaacctggccctgatcgttcagaagattggcgcgactacgccaaccatcgactatcactcacagcaaatggcactcccggccagcacccagaaggtgcttaccgcgctggcggctttgttacagctcgggccggattatcgcttcaccacgacactggaaagtcagggcaacatcacggatggcgtgttgcgtggcaaccttatcgcccgtttcagcggagatcccaccttcaagcggcagaatctgcgcaatatggtggcggaactgaaaaaacagggagttcgcgaaatcagcggcgatgtactggtcgatacctcggtatttgccagccatgacaaagcgcccggctggccctggaacgatatgacccaatgtttcagcgccccgccagcggcagcgattgtcgatcgcaactgtttctcggtttccctttacagcgcccctaaccccggtgagatggcgtttattcgcgtggcctcattctacccggtcaatatgttcagccaggtaagaacgctggcgaaaggctctgcggatgcacaatattgtgagctggatgtggtgccgggcgaattgaaccgctttacactgaccggatgcctgacccagcgcagtgaaccactgccgttggcattcgccattcaagacggagccagctatgccggtgccatcctgaaagatgagctggtcaagtcagggatccagattggcggccatttgaaacgccaaacccagccaggcatgacgggcacggtgatcgcccagacgcagtctgcaccgttgcatgacctgctgaaaatcatgctgaagaagtcggacaacatgattgccgataccgtgtttcgcaccatcggccatgaacgctttggcgtaccgggtacctggcgcgcgggagcagatgcagtacgccaggttctgcgccagaaggccggggtagacctaggtaacagcatcgtggtggacggctctggcctgtcgcgccacaacctgctggcacctgcaaccatgatgcaggcgttgcaatatattgctcagcacgacagcgagctcaactttatctcgatgctgccgctgtccggttatgatggcacgctgcgctatcgcggtggcctacatgaagccggggtcgacggtaaggtttctgccaaaaccggggcgctgcaaggggtctataacctggctggctttatcactacggccagcggtcagcgtcttgcctttgtccaatatctatcgggttacgcggtgccaccagaagatcagaaacagcgccgagcgccgctggtgcggttcgaaagccggttgtatcgggatatctatcagaacaattgaggcccaagggcatgaagctactgattgttgaggacgatgagttattgcagcaaggcgttgcgcaggcaatgtctaacgaaggctacgcctgtgattgtgcggccagtgctgcgcaggctaatggcctgatcgtccccagccagtacagcatggtgatcctcgacctcggcctgccagatattgacggtgccaccctgctgcggcagtggcgccgtcagcaaatcagcatcccggtgttgatcctcaccgcacgcgacgcgttgcaagaccgtgtcgatggcctggacgccggtgccgatgactatctggtcaaaccctttgcgctgattgagctacaagcccgggtacgggcactgctccgccgctatcagggccacagcgataacctactgcaacaggacgatctgacgctcaatctgtccagccagcaggtgtatctgcaacagcaggcgatagacgtcacgccgaaagagtttgccattctgtcgcgtctgatgatgcgggctgggcaaaccgtcaaccgtgagttactgcagcaagatctttatacctggaacgacgatctgggctcgaataccctcgaagtgcatatgcacaatttgcgccgtaaattgggcaaagatcgtatccgcaccgtacgtggcatcggttaccgtttggagcccgcatcttgattagcatgcgccgtcgtttgttgctgatgttggccctgatcctgctggtcacccagcttattagcgcgttttggctatggcatgaaagccaggagcagatcagtttcctggtggatgaaaccctgtcggccaaagtacgcaacgagcgagtcgataccgagattgccgaggcgatcgcgtcactgcttgccccttcgctgatcatgatgatagtgaccctgctggcctccttctgggccatcagttggattatccggccgctgaatcaactacaggaaaagctggagaaacgttcggcagacaatctgacgccgttgccgataaccagcgacagtctggagatggtggcggtcaccaaggcattgaatcagcttttttcacgccttgaccataccatccagcaagagcggctgttcactgccgatgcagcccatgaattacgcacgccactggcgggggtccggctgcatctggaactgatggagcaacagggagttgcgggcagtaaacagttgatcgcccgcattgaccaactgatgcacgtggttgagcaattgctgatgctgtcgcgcgccgggcaggatttcgccagcggccattaccagcagtttgactgggtagccaacgttattgagccattgcaggaagagttggatgagctagccgctctgcgcgagcaaaagattgtctggcaactgccagccagtgcggtgacacatggcgatccggtgctgctgcgcctgatgctgcgtaatctggttgaaaatgcacaccgctatggccccgagaagagtgtcattcgtgttcagctcactcccgagaacgatggacaacgattgcaggtgctcgacgaggggccgggtatcaaacaagaaatggccggagagttgactcaggccttccgccggatggatcagcgttatggcggcagcgggctgggattgaatatcgtgatccgtatcgttcagttgcaccgtggctgtctacgcctggaaaaccgcaccgatgccgacggcctggatgcacagtgctggttacctgataatattttaaatcactaacgtcgcaccatcgattgaggtttcagcaacctcaacaaacagcaagggcccggttcactgaaccgagcccttgttttattgcgcagaattacttctggtagacgatttcgacgccttcgtcgtcatcttcatcccagtcatcatcccaatcgtcgtccgcttcagcttccacttcagcgatttgctcacggtggtaatcatcccacatgaactcgactttttctggcgcgctttcttcgatcgccatggctttaggttgcgtattgatgaagttcatcacgtcccagcacagcgcgttaacgccttcgcggttcgcagcggagatcatgtagtacttaccttcccagcccataccttctacgatcgccttggcgcgctcggcggcctcttcctcgtccagcaggtcaactttgttgaataccagccagcgtggcttgtgtgacagattctcgctgtactggttgagctcgttgatgatgaccttggcattctctatcggatcggactcgtcgattggcgcaatgtccaccaggtgcagcaacacgcggcagcgctccaggtgtttcaggaaacggatccccaggccagcaccttcatgtgcgccttcgatcaggccaggaatatccgccaccacgaagctttgttcatggtccatacgtaccacgcccaggctcggtaccagcgtggtgaacgggtagtccgccacttttggcttggcggcagaaaccgcgcgaatgaaggtcgacttaccggcgttcggcaggcccaacatgcccacatccgccagcagcagcagctccagcaggatatcgcgcatctcgcccttggtacccaacgttttttggcgcggagcacggtttaccgaggatttgaaacgggtgttgccgaggccgtgccaaccgcctttcgccaccatcagacgctgctgatgacgggtcatatcaccgaggatctcaccggtgccctgatcctgcacacgggtaccgaccggaactttgatttcgacgtctttgccgcgtttaccggtacagtcacggctctgaccattctggccacgttcggcacggaaggatttttcaaagcggtaatcgatcagggtattcaggttttcgtctgccaccaggtagacgtcaccgccgtcaccgccgtcaccgccatctggcccaccgttcgggatgtacttttcgcggcggaagctgacgcaaccattaccgccatcacctgccacgaccaggatcgctgcttcatctacaaacttcatttaccgtctccgtaactcattcaccgggccgcttcaaagaagcaaccaggttggtttctgcccgtcgcggccaccaacggtgaccaattgcggaaaacatggcgcctgcaaccaccacaaaagcacctacataaccaacgacattcaatgccggggccgtaaatacctgtggccaggccagcgccaataaatctgaaaacagcagggtaaacaggggagtcagcgtgattaacgcactcacctgggccgcctgccagcgcgccatcgcttccgccagcgcaccataaccaatcagcgtgttagcaccacagaacagcagacaggccaattgccagccactgagctggaaaatcaccgctggcttcgcaagcggaaataacgcgatcgcacataaagtgtacaacaagaccaggatctgcggtgaggccaatcgacgcagtaatactttctgcgccacgccataggtcacccaaaccatggccgcacacacgcccaacaacacaccgagcgtgtagtctgtgaactgagtgaagatctcgatcaggctgacgttgaaaaacagcatcagcccgcagatcagcatcagagcgccaatcacctgagtgatacgcatcctttctttcaggatcaatacgctggcgaacatcatgcccaccggcgagagttggccgataacctgcgaggccgtcggactcaaatattgcagcgaagagctgaagaagacaaagttgcccaacaacccggcagtggcgatcgccagcaacagcaaccagcggggttgacggaacattttcaccgggggtaaacgcccgcgcactgccaggatcatccccaggccgatggcggcaatcgtaaagcgataccagacgatggtaaacggctccatcacttccagcacttctttcattgcgataggcagcgcgccccagcaaaccgctgtggtgaccgccagaaaaataccaacgccagcctgctgttttttttccatcttctcactgtctgtgcgttgtgccgccaggcacaagcaatctataaatgtaaaaagccccgcaacgaattgcggggcttaacatctatttcgtaaggctcgaaaaattattcagcttcgatgctgataaatttacgattgctcgggcctttaacttcgaatttgactttaccgtctttcaaagcaaacagagtgtggtctttgccgcaacccacgttggtaccagcgtggaatttggtgccgcgctgacgaacgatgatgctgcctgccagtactgcttcgccgccaaagcgttttacgcccagacgtttagcttctgaatcgcgaccgttacgagtcgagccgccagcctttttgtgtgccattaatccgctctcctaacttaagcgctgatgccggtgattttaacatcagtgaaccactgacggtgaccttgctgcttacgatagtgcttacgacgacgaaacttaacaatcttgatcttttcgccacgaccgtgagcaaccacttcagctttgatcttaccgccatcgacgaaaggaacgccgattttgatatcttcgccattagcgatcatcagaatctggtcaaactcaaccgcttcaccagttgcgatgtccagcttttccaagcgaacggtctgaccttcgcttactcggtgttgtttaccaccactttggaaaaccgcgtacatataaaactccgctttccgcgtgcccaactgttcagtacagagcgcgctataaatattcacaatagggcgcgaattctacgcaataatcccgcatatgacaagagcagattagggccagaaggtgaaaaaagaagaaaaaaaacacagtttctctcacaacgtttatctgcgccgattttcaagtacaatcaacaggacagttaccgccatgtaccgatgtgagcagcgttctcatcgcggtcaacagaaacacagctgaaaaaaatacaatgaacctagaacaaattactgagttaaccgcgcaagatatggcggccgtgaacgcaacaattctcgaacagttgaattctgatgtcacgctcatcaatcaacttggctattacattatcagcggtggcggtaagcgcattcgcccgatgatcgccgttctggcggcacgggccttgcactatcaaggtgataaacacattgccgtcgcagccctgatagagttcatccataccgctaccctgttgcatgatgacgtggtggatgagtccgacatgcgccgtggcaaggcgactgccaacgcggcgtttggcaatgctgccagcgtgctagtaggtgatttcatttatacgcgtgctttccagatgatgaccagcctggaatcgctgcgcgtgctggcagtcatgtccgaagcggtcaacgtaatcgccgaaggtgaagtgctgcagttgatgaacgtcaacgatccgaatatcagtgaagaaaactatatgcgggtcatctacagcaaaaccgcacgtctgtttgaagcggcagcccagtcatcagccatcctctccgaggctaacccggccgaagagcaggcgctgcaagactatggccgctatcttggtacggcattccaactgatcgacgatctgctggactacagtgcagacggcgtgaccctgggtaaaaataccggcgatgatttgaacgagggcaagccgacgctgccgttgttacatgcgatgcataatggcaatgccgagcaatctgcgatgatccgtggcgcgattgaacaggggaatggccgccatctgctggagccggttctggctaccatgcaggagtgtggttcactcacctatacacgtcagcgcgcagaagaagaagcggataaggcgatcgccgcattgcagattttgccagactctccttatcgaaccgcactggaaggattagcgcatctggcggttcaacgagacttttaagaaatttaagtttcttaatattcaaacaggcctgttttacaggcctatttatttgccttgctaatgagatccagtagccccgcagccccattcttcgccagaaaactcaataaaaccgcgtattcttctggtttcatacccgtcagatagctctgcaaacgtgcccaaggaacgccatcacgggaaacggtataagccgccggttcctctgcggcaaggggatatctctggggatacaactcgttttgagtcgagaggggcaggctgctgatatgatactccttagtcaccccctgcttgccaaaacgccgctgccatcgccagttttgctcacgtgctcgcttattgatcccttgtggggagctgcccaattcgcccttctctttcagttcgttggcagtaaaccactccttgtccattcccgctccttgatctcggcgttgcctctaactgacttatcagaccttccagttgcatgaacaactaatgccaatgagttagttataacattaaccagaccgctgccaataaccaaaaatttggcgaaatactcaagaaatgtttatcaaacaaggaaagggaaacacagaggcggcgcagaaagtaacttgctgggcgcagcatacagcgcccctatgtagcgcaggtcagttgaggaatgactcactgcttatttttttcagcaatccaggtcagcaggctatccataccttcgcgcatcaaaaacgccatcactttgccacgctcactgtctgaaagttggtaatagtattcaacccacacggcaagtgggtcctgacgcccggcctcgtagatcgcaggctcttcgcgcaataccagcagatttttgacgccggttggcaagctgtcgatatgatattccagcgccttgccttgcacgcctttgcggcgacggctgagccaattttcgcgccgggccatcagattgattccctgtgtagaggacggtaatcctgcgatgcctatcagctccttggcagcaaaccactcgtttttcatagccatgatctcgggacaatagtgtggcaagacaaatttttcagaaaccataaggtatttttgggaaacttggtggtatcctagtttctgaataaacgcttcacgttgttcaaacgattaatactgacctgttagttataccactaacagaactttctctaatcaaaaaaggaatgaaaatatgaattcacgggacccagattggcatccagcagacgtcatcgcggctttgaagaagagaggtaccactctggcagcggtttcacggggggcagggctaagttcatcgacgttggccaacgcgctgtcacgtccttggcccaagggagagtggttgattgctgatgcactgaacgtacacccggcagagatctggccgagcaggtattttgatccgcttacccatcatctgcgagatcggaaaagtcgaatcaaatcatgataaacataagaaagccgccggattcggcccggcggcttatcaaaacatcacatactgagggatcagttgttgataaacttctcgcccagttcgatatctttgtgcagtacgtccagcatttcgctcagcgctttttgctcgaaggcgctcagggtaccgatgtctttacgctcttcgataccatttttacccagtagcagtggctgtgcaaagaagcgggcatatttgccatccccttcaacataggcacattccactacgcctttctcaccgctcaacgcacgcaccagagagaggccaaaacgtgcagcagcctggcccatagacaaggttgcagagccgccaccggctttggcttcaaccacttcggtacccgcgttctggatacgtttggtcaaatcagccacttcctgatcgctaaagcttacgcctgggatctgcgacagcagaggcaagatggtcacgcctgagtggccgccaatcaccggtacgttcagttcttccggttgtttgcctttcagttccgcgacgaaggtgttggaacggatgatgtccagcgatgtgataccaaacagtttgtttttgtcgtacacacccgctttcttcaacacttctgccgcaatggccaccgtggtattcaccgggttggtgatgataccgatgcaggctttcgggcaggttttggccacttgctcaatcaggttacgtacgatgccagcgttaacgttgaacagatcggaacgatccatccctggtttacgcgcaacgccagcagaaatcagcaccacgtccgcaccgtgcagcgcaggggttgcatcttcgccactgaagcctttgattttaactgcggttgggatgtggcttaagtcaacggcaacgcctggggtaacaggggcaatgtcgtagagggagagttcagaacctgaaggaagctgggtcttgagtagaagggcgagggcctggccaataccgccagcagcaccgagaactgcaactttcatcctatactcctttattgtcttaaatataaaagcgccgtgaattctttggtcacggaccttaatttatcacgcctttaaaaacaacctcttaacagtcggttttagatctggcgcaataaaatggccgatgttgcgagcattttaaagtaaatagcttatgcattaagggcatagcgcacactaatcgaaaatagtgccaagcttttcacgatcgcgttaaccggcggttacattacacccttacgtaacatcagaacaacatcattttaataacattttcgttaccggagagctgactcgcttcccgcaccgaaagggcatattcatgagcaacggattttgttaaaatcgcgctcttgcctttctgtctgggcatttttgattttccagacggcccccatattgcataaaaatgcatttatatgcataataatcaactctattaccaacattccacggtgcaaaatgcgtaatcccgcaaagcaggaagatctgatcaaggcgtttaaggcgttattgaaagaagaaaaattcagttctcaaggcgagatcgttttggcgctgcaagaagaaggcttcgagaacattaaccagtccaaggtatcgcgcatgctgaccaagttcggagcggtacgcacgcgtaatgcaaaaatggaaatggtgtactgcctcccggccgaacttggtgtcccaaccaccaccagcccgctcaagaatctggtgctggacgtggaccataacgacgcggtggtggtgatccataccagccctggtgcggcgcagctgattgcccgcctgttggactcactgggcaaatccgaagggatcctgggcaccattgccggtgacgacaccatttttgtcactccggccagttcatttaccgcacgccaactgtttgaagccattctctccttgttcgaacaggaactttgatgcattcagcgcagcctgcggctctccgtcgcgggccgctcatcctttattaacccttcatttacttcttccgcgctgcctaccacgtttaaaactgccaataagccgacttgcagcacatatcaatgacatttttatgtagctagcgatagtgactggaagtttccgcacttttagttaaaagcacttagctcattgaaattacaaaaatttaacatcaaaagtgtattttatcgccgttttttattccattaggttattaaaagtaacgttcaccctaataaagtttcactagaaactgttagtcggctattaatttttaccgttactagatgtatactcattttcgtgacgtaaatcacagttcatcggaactgataaaagaatacgaagaggataaatcatgaaaattaaaactaccgtagcaacaattagcctgctgtccatgctgtctttcggtgcattcgcagcacaatccattgatgcctcacaggctgaaaaactgcagtctgccggtaccatcaccgtgagcggcgtcggtgcagcaccttctgatatccgtcaggcgctatctgccaaagccgatgcccaaggcgcgaccgcttaccgtgtgatcgaagctcgtaacgaaggcaactaccacgctaccgccgagatttacaaataagtacaagatgtgatgtgagcattgcacgacaactctctggtaaaaaaacaagcagataaccgccttcaagtataaaaaacgctgtaaagcccttccaggccgttatctctgaacgattaaggatcgaagtatcatgaacatgaaaactactctcgttgcacttagcctgctgtctgccgtttctttcggtgcttctgcggctaacctggtcactgatgcccaagccagcaatctgcagtccgtcggcaccattaccgctagcggcgtgggtggcgcaccttctgatatccgtcaggcgctgtctgataaagcggaccagcaaggggccaaagcctaccgtgtgatcgaagcctatgaaaatggtaactggcacgcaacggctgaaatctacaagtaaaaaaccgaggccgcgtttactgaactgactaccctcgtcactgccactgccgagttctcaggtaaacgctagtaccttggaaattatcgtcgtcctatccgacgaaccccattgccctcgctcgcgagggcttttttatgggcgtaaaaaaggccgcatcagcggcctcatattgctagggtcgccgcatgcggcgcccgtttagctaaacgtcagtaggtttctttcggttcggccttgttagccagccctgccagtagtttgtcatgaatgccgccaaacccgccgttgctcatcaccagaatatggtcacccggctgcgcggttttcacaatcatctccaccagcgtatccagatcggcactccagtgcgcgggttggacgcaagcttcggcaacttccgctacctgccaaggaatgtggtgaggctggaacaggaacacttcgtcggcacggccaagtgagggcgccagatcgtttttgctgatccccattttcatggtgtttgagcgaggctccagcacggccaggatgcgtgcggtgccgcccactttgccacgcagtgccgccaaggtagccaaaatggcggtcggatgatgggcaaagtcgtcatacaccgtgacgccattggcttcaccacgcaattccagacggcggcgggcattgataaagtcacccagcgctcggcaagcatcggctggctgcacgccaacatggcgggtggcggcgatcgccatcaggccgttatgcatgttgtgttcgcccaccagcgcccagttaacctcccccaccttctcgccgttgaggaacacttcgtaatggctggcatctgtcgtcagtttgtgtgcacgccacgcgcccccttccccgacccattcctgttcgctccagcatcccatcgccatcacctgtttcagatgggtatcgttttccggcaggatgatcttgccttggcccggcaccaggcgcacgaggtggtggaactgtttctggatggctttcagatcgtcaaagatatcggcatgatcgaactcgaggttgttcatgatcaacgtgcgtgggcagtaatgaacgaacttggagcgtttgtcgaagaaggcacagtcatactcatcggcttcgatgacaaagaacgggctgccgccaagacgggccgagacttcaaaattacccggtacgccgccgatcacgaaacccggctgatagccgcaggcttccaggatccaggtcgccatcccggcagtggtggttttaccgtgtgttcccgctaccgccagcacccagcgatcgcgcaggacataatcatgcaaccactgaggaccagacatgtaaggaatgctctgttccaataccgcttctacgcacggattaccacggctcatggcattgccgataatcaccagatccggagccggatccaactgggcaggatcgtaaccctggatcagatcgatcccctgcttttccagtaaggtgctcatcggaggatagacgttggcatctgaaccggtcacctcgtgccccagtgaacgagccaacatggctagcccacccataaaggtgccgcagatcccaagaatatgtatgcgcattaggtttctcattttagtgcatcgatttactgcctattctagcgctcagaatcgctcagaagaaatggatttgcctatgaatcgcaagttgctttgggctacactgctgacgaaaacgttggcggtatgttaacaagccgctatccatccgtagattcagggattgtgtcatgaaaacgttaggcgaatttatcgtcgagaaacaacacgacttctctcacgccaccggtgagctgacctcattgctttctgccatcaaactgggtgccaagatcattcaccgtgatatcaacaaagcgggtttagttgatatcttggggactaacggcatttcaaacgttcagggcgaagttcagatgaagctggacctgttcgcgaacgaaaagctgaaagccgcgttgaaggctcgtggtgaagttgcgggcatcgcttcggaagaagaagacgagatcgtgattttcgacggcgagcgagctgagaatggcaagtatgtggtgctaatggatccgttggacggctcgtccaacattgatgtgaacgtctcggtcgggacgatcttctctatctatcgccgcatcaccccgattggcacgccagtcaccgaagaagatttcctgcagcctggccatgcacaggtagcggccggatatgtggtttatggctcctccaccatgctggtttacaccaccggttatggcgtacatgccttcacctacgatccgtctctgggggtgttctgcctctcccacgagaaagtgcgcttcccggaaaaagccaatatgtattccatcaacgaaggtaactacatcaagttcccgctcggggtgaagaaatacatcaaatactgccaagagcaggatgaagccacccagcgcccttatacctcacgctatatcggttcactggttgccgacttccaccgtaacctgctcaaaggcggcatctatatctacccaagcaccgccagccacccacagggcaagctgcgtctgctgtatgaatgcaacccgatggcgttcctggctgaacaggccgggggtaaagccagcgatggcaaaaaccgcattctggatatcgtgccgcaacaactgcaccaacgtgcgccattcttcgtcggcaccaaatcgatggtagaagacgccgaacgctttattgctgatttcccggaccagtaacgctataaaaggggcggcatgccgccccttcacatcacagtttgaacacagccatactctgtgccaatagctgcgcctgctcttccaaagagcgagttgccgccgctgactcttccaccagcgccgcattctgttgtgccacctgatccatttgcactaccgcctggttgacctgttcgataccactgctttgctcgcgagtggccgcagagatttcacgcatcagcgccgtgacgcgcccgacttccccggttattccgttcatggtcttcgccgccgtagccgccatctgttcaccttcccgcacgcggtgttgtgacacttcgatcagccctttgatctcttttgccgattgcgcactacgttgggccaggctgcgtacctcaccggccaccacagcaaaacctcgaccttgctcaccagcacgtgccgcctctaccgccgcgttaagcgccagaatattggtctggaaggagataccgtccatcacgctgatgatgtcggcaatccgtcgggagctatcggtaatggcctgcatcttgttcatcacctggctgaccacgtcactgccctgctcggcaatatcggagacgctcattgccaactggttagcctgttcacagttttcagcattcattttcaccgtagaggtcaactgctccatgctggctgcggtttgctccagcgaagcggccgattcctccgtacgctgcgccagatgaaggttacccgcagccaactcgcgggagccggtatcgatctggctgctggcatcgcggaccttactgaccgacatcaccagcgactgctgcatacgctgcatggcactcaccaagcgccccatttcggtatcaccttcaccgctgatttcgtgggtcagatctccggcggcgatatgctccaattggacgatcgactcatctaacgggcgcagcaagatcacacgcatagcaaaccaggccaacaccgccagtaacacgctgagtagcccagccgcaacgatcaggataatcttggtgctggcattactttctgcctcatgcgcatgctgctggccaatctccatggcaaacgcgcggaactcactgaggtcggcttcaaaagcaatgctcagcttagagatatgattttcttgaatggcgtaatagtcatccaacttccccgcctttatcgctgccgccatgggcgcaatgccttgctccagataggcgcgatagctctcctgcatccgcattgagaattggcgaccccgttcggtcaccgttcccacgtcgacaaagcgtgccatttcctttttcgactgttccagatagccataaatacgccccaccgaggcgtcagcaacctcaatttgaccaatctcgcgctggcgtactgcaagcgaggccgccgttctggcccgtagcgccaggttggaactgttggccaacgaacccagttcttcccccaggatctggttcagagtctgtagcgaacgtgttccgtcgttaatggctttaaccccgatgatactgacaacaatcaacagcaacgtcatcaggctcaacagggcaatcagcccggccttaacggtgatcttctttaacatgagtgtttcccggctttagaaaaaagtagcttcagatgtagaggaggcaagaaggcaggctcagctagctgctggaccgttattatttgaggaagttatcggcagccggggagtaaacttcaatcattaagggattaatctggaaaagttgctgttatcgaccaggcagcagctcaatgatgaaaagggcgggaaatcacaaaagactccgctataatagccgccactccatttctggtttgattaaaggaaaccgacatgagcttgaacctggtccctgctggcaaagacctgccagaagacatctacgtagttatcgaaatcccggctaacgccgatccaatcaaatacgaaatcgacaaggaaaccggctcgctgttcgttgaccgtttcatgtccacggcgatgttctacccgtgcaactacggttacatcaaccacaccctgtcactggatggtgatccagtagacgtgttggtgccgaccccatacccactgcaaccaggctctgtgatccgctgccgcccagttggcgtgctgaaaatgaccgacgaagccggtgaagatgccaaactgattgccgtaccgcacagcaaactgaccaaagagtacgatcacattaaagatgtgaacgacctgccagaactgctgaaagcgcagatcagccacttctttgaacactacaaagatctggaaaaaggcaaatgggtcaaagtagaaggttgggcagacgctgccgcagccaaagctgagatcgttgcctctttcgagcgcgccaagaagtaagtctcgcccgaactgataaaaaaacaccgcccaaatgagcggtgtttttttttactgcttttcgtcaagacgcttcagccagtcaccgctttcaatccgcgggaaaccgtccacgctgtgtctatacaggtagatccacgcactgccataaggcgtacggatcagctcgcgcttgtagtctttggtattgcttttcaactcgtccagctcggccagaatcgatgagttaatacgatacacttcgcagtgtaccgtgccctctccagggatcgccgccgggtagtggcccagattatacagctggtagccttctaactcatgttcacccaaccattgggcgttggtcatccaatggctgtttccctgtttgcgtcgtaaactgccgtagacaattattcgcatagctaaaactcaaactgatagagcacatccagtgcctggtcgagaccagacaccgcttccagatacaacctaggcatcaggcggtatcgcaacgtcagcgtggccaatgagtcgaagatccccaccccatattttacttgtaagccagggaggacatagccgctcaccactacctgagagctgtcgccaactccctcggtatccagggccagattacttacgccaaacgcctcgccgattttacccacaagttgaccactttgtgcaacccccatgccaattaacattgaggtcatggcgttgccatcggcaccgccagcccctaatccctggccgcgcagcaggtaagacagcgcttcttgctgagacatgaccggatcggagaacacttccagccttggcgcatcggccatgccggtcacgcggacaccggcggtcacatcattttccgtggcgtccggattacggatcgcctcaatattcagcagcggttgatccggtggcccagagaagatcagttggcctttgcgcacgagcagatcctgaccataagcatggaagcgccccgatggaatattaatctggccatgcacccccagaccatttcggtcctgtgccacacgcagatcgccacgcaggctggctttcagaccaaatgcatccagacgcacgtcgttacccacgcggatcgtcaggttactgttgattgggatccctgccgtcgccggttggatcggcttgagctggttattcaacatcacttcatcaggagaaactccgaccgcactttctggtagctcctgcaccgtgatgcgcgcccaagggatagctacgctaccgttgagtgagaacagctgcggcgtggcttcaaataccacatccggcgaaacatcaatacgtatcattggcggcagggtcacccgtagccgatcgcccttggctgcaatacgtgcacgccaggcattgatatcccgccagtcggcatccccggcaaggttgagctgcccatgagtggtcgccagcaatccttccagggtcgaggtcatcccgttgaagttcatcgccaggcggccttcggtcatatcaaacggcatccagtggccaacgatcgccaccttatccaacgccagacggccaaacaccagcggattctgcgcattaccgcctaattgcaggttggcattcagcatccccgcagctttctcgccctgcgtcagtatcgggttaagcagcgccagcgacacattggtgatatttacgttgccgctgatagtgcggcgtacctgcggatcggcgatctgaacgttgccgttaaactggccgttattggtcagcttgatcagccagtctgcctgcgcccggccattgttcagtcctgcattgaggtttagcgtgtcaaaggcaatcggcaatgcgttgccttgcacctgctgcaccactttcacccctttgcccactagtgaaaccttcgcctgtggcaatgcgccccccggttgccaactcacgtcagctcgaccagtaaagaccccgttcatggaggtatccggcccgaggaacggtttgatcatcgccaggtcaaagcggttgagtactacgctggcctggccgctggcccccgcctcgatggttctaggaacgcacagctcggcattcgggttcacccagcaatgcggtcctacgctgatcttctgttgcgtattcaggtaatccaacgcgatggcacggctaagacgccattcgcctaccggcgtatcaaagcgagtgttgttcaggttgcctcgccagcgttgttgctggcgatcaaagctgccctccagcgccaattgcccggagactggcttgccatcgatgttcaattgcaaccgatgttggcgctcgctgcctttggcatccaacgtcaacagattgacctgcaacgtatcctgtttgagctgttcaacccgtaccgccagctgcccctggatctgatcgctggaacggacatcgccgttgaccttaatccgattgatgtgcagcgcctgccattgcaggcctgtcgcggtcaggtctgccaataactgtggtgcctgcatattcccgcgcagtttcaactgcccgcggacattcccagcaaggccaggcaaggcgccatcgagatgtgctgcatcaacattggcatccagcacccagcttttctcatccaactggcctttgacgttgagcgtattgcgccctaacgccagatcgatacctgggatcgtccactgcccggccgcattgccacgcagggaaccacgtgccgataccttgttttgtttcacattgccgtcaagctgcagcaccggtacctgtaattgccaactgccgccgtgcagactgccacgggtagtgattttcccttccaagcgcgctggccattccggccattgcttggcggtattaatgcctgaaagcgtcagttgtgatgtccaactgatcgctttactccagtccaccagcgccgtcagatcggtattcccctccagcgcaaccaaccgcaagcgctcgagcctgaactgttcaaggttacctttaccatccagctgtagcactgccggtggcagatcctggcctttgaaattggcgcgggtagataacgcataatctgcggccttgccgttaaagcgcaggcggaagtcattaacctgatactgcgcctcgccggtcagcggccatttcagctgtttgctttgcagcgtcaacgccaagggcaaccccacctctgccaactgggtttgcacatccagctgcgcaccaacagggccagacaggttaagcgctactttcagctcttcacgaagcccaccagacacattcagcttcatcttctcgcctttcagcggatcgatattcagcgtgctgttggccaccatctccaccggccaagtgccggtcagcgttgcctgccctttggcggaaatcatgccttgcggcgatctcacgtcaaagcgatccaactgaatgtgctgatctttggtgttggcctgcagctgcaagcgggtgatcgacacctcagtgtccccggtcagatgtagctgctcgccgttgatttcctcaacggtaatatcaagcggcagacgaatttctggcagatccggcagcagcggtttggcaaacagcgccttcagggtttcgcccaacggtttctcttccactggcggtggcatcaatgctggcacaaccggcgttttctctgccaacttgtccgccactttctccgcagctggctgcagcgcctccggtaaaggattgaccggcgtttttggcaaggcgaccagcaaagcgcgaaccgtagttggcatcaacgtcaacgcacgttcctgccactgtgcgccagtgctgaattcccccagcgagatcgccgtgtcgtccacggtaaccttgacgttattcaacgccagcttacgcagggtaatgggataaggcgtgctgagatcgccgatcggttcactgctttcctcaaccggcgcagaaggcgccatttcggcggttttcaccaccacatcaacatcctgtgcggtcagcgcattgacacacaatgaactgcgtttaaaacaggagagatcgagcgagagatggaactgcccggcgttaaccgccacgcccggcatctgatacttcacgcctttcagggtcagatcgcgccagccaccactgacctccgcaatttctaacccgggtacccagcgggcagccccgttgattaccatatgcaagccggtcgtggtgccaagcaaaaacgccaacgtgccgatcagcagcaacagcaggatcaaaaaccccagacaaatcttttttatcaggctcatagttcaggccccaaaccgatataaaactgtaggccgtgggtctctttatccccaaccggcgcggcgatatccagtttcaccggccctaccggcgactgccagcgcacgccgacgcccgcccccgtcttgaaatcgctgtctgagaatttattgaccgcctgcccggagtccacaaacatcgccccccaccaacggccggtgacgttatattgatactcaagcgaccccgtcaccattttagaggcaccggtcagcttaccatcatctccacgcggggaaatgccctggaatttataaccacggatactgcgatcgccaccggcgaagaagcgcaaatccggtggcaccttgtcaaaatcgttggtttcgatccagccgacctggccacggaccacaaagcggtttttctcgcccaaggtgcggatccagacgttctgcgcctgcagtagcgcaaaatcgaccccggagccccaagtggtatccgacacgtcaatggagtaacgctggctatcgccccataccggcatcaggccaccgcgtgaacgcgtacggttgatggacacaccaggataaagcagcatggtggtattggtgacggtaccttgggtaaagtggtccagacgccagctgaggttgatcgcacgctgccaaccgctggaaagatcccagttacgagaagccacgaccttggtactgtcagattgagtatcgttcaggtccgtacgtttgaaaccggcctgcaacaggtaatactgttccagcgggctacgcagcaacgggattttgtaggtcagatccaactgctgctctggcgcggaaatactggcggtggtggtcaggctgtggccccgatcgttcagccagggcttacgccaggttccccgtacacgcgggccaatgtcggtagaaaaaccaccacctagctccacgatattgctgcttcgtggcgtcaccaccgcatctaacggcaggatcttgctctctttagagtcggtaaagtctggagacaccaccaccgagttgaaccagttggtggcagataaacggcggttaagttcggcaagatcgttcgagctgtaataatccccctgatggaagggaagcagattttgcagatagtcctcgcggatttgcgagcccttgaaaatcactttgccgaagtgatagcgctcaccactgtcgaaatcaatgtcccagaacgccttatgcaactcttccgccacgccaagttggctcttgagcatttgagcatcaaaatagcctttacgcagcgccaggttggtcagcgaacttttaaaactgtcgaactgaccatggttgaggatctcgccaatcgttgggcgatcggttctgaccagattcaggtaatcttcgtcggttctggccccgccttgcagctggatatccacacctgcaatacgcaccggttcacccggatcgaccttggcgatcaataccggccgcgaaagcttcgggttatcatcaaaggtgaattcaatcgtaggctgataatagcccaacggccgcaaccccaggcggatggcagcatccacccgagcgcgaaaacgcccttcggcattaacctcttccggcgtgatcgccgaaaggcgcacacgaacgttgcgctccaaatccccactcaggccgtcaacctgcagccgcacattcgctgctaacaccgacggcgtaacgaatagcgcacataacatgcaaaggacacgatatcgtggcacaggtgctccttaattgatttttctgtcctgtcagtacctttgctctggtgctggggcggtgctgcgctatcagactgccccccttacctttagatcccagacgctgcccatgcggcatcgaccgttaccgaaaacaagacgcattcttagcttttggcgctcaaaatactgcgttaagctgatacataaaccttagatagggcttattgtgggcaaagaagcggccagttacaactgacacgcgtccctattaggctaattcttattatggcaatgggagtcaaacatgatgcaatcttttgataagtctcacaacatcgataaggcaagtgcgcttcctggccgtacaacgccaatgcccgtcgctgcgcttaacgaggtgaccggccattccatgaccttcgtacccgaggggatggcaacggccatcttcggtatgggctgcttttggggcgttgaacgcctgttttggcagcagccggggatttatagcactgccgcaggttacagcggtggctatacgccaaatccaacctatcgcgaggtatgcagcggccagactgggcatgccgaagtggtacgcgtagtctttgacccgcaggtcatcagctatcgccaactgttacaggtattctgggaaaaccacgatcctgcgcagggcatgcgtcagggcggggatatcggtacccaataccgctctgctatttactacctggatgcagaacaacaggccgaagcggagcaaagcctgcaagcattccaacaggcgatggataaagcgggcgatcagcgcaccatcaccactgaaatcgcaccggcactgcctttctactatgcagaagatgaccaccaacaatacctgcataagaatccaggcggctattgtggcctgggcggcattggggtgtgcctgccgccacagggttaagctgttaatttttaaccactggcggccctcacggggcaactgctatactgtgttgggccgcgtttgcggcccgcttttgtgggcgcgtgatataacgcaccttggatccacctttttaaacggtattacccctccgaaagatcgccgacatcccgtcggtacgaatggatagactatgttaaacagtattttactgattctttttctgatcgcagtgagtgcgtttttctcgctttcagaaatctctctggctgcgtcacgcaagatcaaactcaaactgatggctgatgaaggtaacatcaatgccgccagggtccttaagctgcaggaaaccccgggtattttctttaccgtggtgcaaatcggcctcaacgccgtggccatcctcggcggtatcgtcggcgatgcagccttctcccccagtttcaaattgattttcgaccgttttctgtcacccgagatttccgaacaggtaagctttatgtgctcgtttgtgatggtgaccagcatgttcatcctgttcgcggatttaacgccgaagcgcatcggtatgattgcaccagagacggttgccgtccggatcatcaacccgatgcgtttctcgatcatgctgttccgcccgctggtctggttcttcaacggcatggcaaacctgattttccgcatgttcaagctgccgatgatgcgtaaagacgacatcacctccgaagatatttacgcggtggtggaagctggcgcgctggccggggtactgcgcaaacaggaacatgagctgattgaaaacgtcttcgagttggaatcgcgcaccgtgccctcttcgatgacgtcccgcgaaagcgtgatttacttcgacctgcgggaaagcgaagacagtattaaagaaaagatctccactcacccgcattccaagttcctggtatgcgacggccatatcgatcaggtcgttggctatgttgactccaaagaccttctgaaccgcgttttgggcaaccagagcctggtactgagcagcggtgtgcagatccgctcggcgctgatcgtgccggatactctgaccctgtcagaagcgctggaaagctttaaaaccgcgggtgaggactttgcggtgatcctcaatgaatatgctttggtggtcgggattattacgctgaacgatgtgatgaccacgctgatgggtgacctggtaggccaaggccaggaagagcagatcgtgacgcgtgatgagaactcgtggctgattgaaggtgggacgccaatcgaagacgtgatgcgtgtactgcatatcgatgagttcccacaggctggcaactacgaaaccattggcggctttatgatgtacatgctgcgcaaaatcccgaagcgcaccgactttgtaaaatatgccgggtacaagtttgaagtggtcgatatcgacagctacaaaattgatcagctattggtcaccaggctggtcgacaaaccgatcacagtgctaccaaaagccccagatgaaacacctcaggcctaaattctcctgcggtagaaacattagcggcccctaaggggccgcagttactttgctttgcaggtactccatacatcgcgctttagcccatttcggcctgcagtaacaacacctgccggttaacttctgacatcacattgaagtggcgtttgtcacgaaccttcggcaacaggattttccccttgtcgaattcgaacgcccccacatccttgatgtacagtcgcccccggaacagggtttttacatacgtagccactttcagtgggttataacgctggaagattctcatagttgttactctcctcccattggatccatgcgctcagcgagcggccaaagtggccacctcgacattcggagcgcaacttgattgctttctagtagactgagtaaagaccatttcgttcaacttcgcctggatttctatcctggatttacacttgctgacagaattgtgtatacctatttataacctttgcagtatatccattcaaaaagcgcgtaattgtctccagaaggaaaaactgcgatccggttaacaggacagacctcggatgagcacctatgctttaatcaccttgagtcatattgagacttatttccctctgcaggagaacgcatgaaaaatagcatgctgataatatcgctgctgttggccccgatgttggcctctgctcacaaccttcagctccaccagcgcgtggcacctatcggcgtcagcgataaaggtgagttggactatgttgataataagtttagctacaaaggttggaatagcgcgcagctcaatggaaaagtgcgagtggtgcaacatattgctggccgcacttcggccaaagagctcaacgatccgctgattgaagccatcaaagccgctaagctaccgcacgatcgttaccaaacgacgaccatcgtcaataccgacgacgccatcatcggcaccgccatctttgtgcgtaacagtattgaagacagcaagaaagagttcccttggtcgcagttcattgtcgacagtaatggcaacgtcaaaaaagcctgggacctgcaaccaaaaggctcggcaattgtggtgctcgataaagaaggcaagatccagtttgccaaagatggcgcactgacgccgcaagaggtgcagcaggtgatggagatgctgcaccagttgctgaaatagcgcttaaacggcgtcccgcacggcgatacgcggtgcgcagcctaaaacagagaaaccctaaagccagggttcaggaaagactcacgcggggtgtataacagcggcttgccctgccaatcgtggatctgagccccggctgctaccgctaccgcgtgccctgccgccgtatcccagatattggttggcccaaaccgtgggtaaagctgcgcccgcccttccgccaccaggcagaacttcagtgacgaacctacagagatggtttggtgtgcgcccaactgttgcagataatcctgtaattcctcatcactatgagagcggctgaccactaccaacggtagctcggcattactgacactaatctcacgacgtcggcccccctcttccttccaggccttgccgcgttcggccagatacagcacgtccatcgccggagcatagaccactcccattaccgcctcaccctcttcgatcagcgcgatattgaccgtgaactcaccgttacggtttaaaaactctttggtaccgtccaccggatcgaccagccagtaacgcgtccagttgcggcggacttcccaggcaggagggtcttcctctgagagcagtgggatctccggcgtcagtgccgccagacctcgtttgataatatggtgcgcggccaaatccgcggcagtcaccggtgaatcatcttttttctgcgccacatcaagcggttgttcaccatgatataccgccatgatcgccgtacccgcctcgcgggacagctggcaaatctgctccaacatagtgcacctcagacattaagttccgtgggacatttcccctttctatagcttgcagcctagttttttttgggcggaatatccatctcaactcgctaagctgcggtatttattcaagtcttctctgtcacaactttgcatatctgtccgttacattcggccaatttatgccagacttcacagtttgctgataaagagagtggtaattacatacccctttgagatgccactctaagattaatccaatggagataaccatgatcaagcgccctttgggactatctgccctggccctgctggtttgcgcctcaacgcaggcagccacggttgacctgcgcgtgctggaaaccagcgatctgcacggcaatatgatggacttcgactattacaaggataagcccaccgataaattcggcctggtgcgcaccgccagcctgatccaacacgctcgccagcaggtgaccaacagcgtgctggtcgataacggtgacatcatccagggcagcccaatggctgactatatggccgccaagggcttgaaacctggcgatacccacccggtctacaaggcgatgaataccctggattatgtggtgggcaatatcggtaatcacgagttcaactacgggctcgactatctgaagaatgccctggccggtgccaaattcccctacgtcaacgccaacgttattgatgccaccacgcaaaaaccgttgttcactccctacattattgtcgataccccggtaaaagaccgtgatggccaagctcatactttacgtatcggctatatcggcttcgtgccgccgcagatcctggtgtgggacaaagccaacctgcaggggaaagtgaccgtaaacgacatcaccgaaaccgccaaacgctatgtaccggaaatgcgcaaacaaggtgccgatctggtcgtcgcgatcccccactctggcctttccagcgatccctataaggccatggcggaaaactcggtgtactacctcagccaggttccaggcatcgatgccatcatgttcggccatgcgcacgcggtgttccccagcaaggatttcgccaatatcaaaggcgcggatatcgataaaggcctgctgaacggcgtacctgcggtgatgcccggccaatggggcgatcatctcggcatcgtggatctgcaattgaataacgatgagggaaattggaaggttaccgcagcgaaggcgcaagccaggccggtttatgacaaagagaacaagcgttcgttggcagcggaagatcccgcgctggtcaaggtgttagaggaagatcataagggaacgcgtgagttcgtcagcaagcctatcggcaagtccgacggcaatatgtacagctatctggccctgatccaggacgatcctaccgtgcagatcgtcaacaatgcgcaaagagcctacgttgagcgttatattcaaggcgatccggatctggccgatctgccggtattggccgctgcagcaccgttcaaagtgggcggccgcaagaacgatcccgccagctttgtcgaggtggaaaaaggccagctcaccttccgcaatgccgccgatctctatctatacccgaataccttggtggtggttaaagccagcggtaaggaagtgaaagagtggctggagtgctccgccgggcagttcaaccaaattgacgttaacagtagcaaaccgcaggggctgatcaattgggacggtttccgcacctataattttgacgtgatcgacggcgtcaattatcaaatcgacgtcagccaaccggcacgttacgacggagagtgtacgctgatcaatgaccaggcggagcgtatcaagcagctgacctttaagggcaagccgatcgatcctgacgcccagttcctggttgcgaccaacaactaccgtgcctacggcggtaagtttgccggaacgggcgataagcatattgcctttgcttcaccggatgagaaccgcgcggtattggcggcctacatcagcgaagaaacccagaagcacggcgcggtgcatccacaggcggacaataactggcgtttggccagcttccacagcccacagccgctggatatccgctttgagacctcccctagcgagaaggctgctgcatttattaaggataacgcccagtatcctatgaaatcggcgggtaacgacagcatcggctttgagctgtataagatcgacctacaagccaaataattgcgcgttaggcgcgttacggcgcgccttttagcctctacccctttttaaccatggcgcaccctttaagctgcatttaaaatacatgttatagttttcttactttaaaggggcatcatcatggattaccgtaaccaatccctaggcgcactcgccatcgcgatcccacgtgccagcaagctgttccgcgactacgatctggacttctgctgcgggggtaaacaaaccctggagcgtgctgccagccgcaaagaactggatctggatcagttggaaagtgagttggccgcgctggcggcagacccggtggatacccgcgattggcgccaggctccgctggctgagatcatcgattacatcctgccacgcttccaccaacgccaccgtgaacagctgtcagaactggtgttgatggcggaaaaggttgaacgcgttcacggcgacaagcccacctgcccacgcggactggccaagcagctaaacctgatccggctcgatctggaaaatcacatgatgaaggaagaacagatcctgttcccgctgattaaacaaggcatggggcaacaggcggcagggccgattgcggtgatggaacatgaacatgatgaggctggcgagcagttggaagtggtgaaattcctcaccaacaacgtcacgccacctgatggggcatgcaatacctggcaggcgctgtacagtggtatcaatacgtttatcagcgatctgatggagcatatccatctggagaacaacctgctgttcccacgcgcactgagcggcaaatagcccctccccctaaaccctctcccaaagggagagggacacaacgtagattacagaatttcgagcagctcaacgtcaaacaccagcgcgctgaatggcgggatggatgcgcctgcaccacgctcgccataggccaggttgtgagggatatacagctgccattttgagccaactggcatcagcgtcagagcttcgatccagcctgggatcacaccgctgaccgggaactcggcgggttgaccacgttcaacggaactgtcgaacacatcaccgttgatcaggcgaccggtgtaatgcacacgcacgcgatcctgacgtgatgggattgggccattgccttgctccagcacggagaactgcaggccagactcggtcagcgtcacttcgtcacgcttggcgttatcttccaggaacttctggccttcaacggccatcgcctgctggcgctcaagacgcacagcatccgcacgttcgtggatttcacgcagcgcacgatggaccacatctaccggaaccgccggggcattcccttccagcgcgtcacgcaggccagccagcagagcttctggttgtaaaccttgcaggccggactcttgcagttgctgaccgacctgtaaaccaatcccgtaacttgcttgcgcttcaacgctatcaaaagaaggggttgtcatggggttttcctttagtctgtaaaaagtcgaaagcgcagcataacagcgcggcaaagccgggtaaaatcttgtgtggagaatgatgacttttgtcgtagaaaaagaaacaataacctgctgttaacgtttggtgtcattattctctcggctaccaatcgcttcaaacagttagcgatatagacccggtacggctcaaggctggcatcgaagtggcgcagtgcagagactattcgcccctgacggtgcacaagtgcactgcggcttgaaaccatagggtatactggggtcagcgatacactttttgtaaagtgacaattttacgcagttgaagagaggtcaccatgggcagaatcgcgcccaggagaaggaaaaccacccgtgtctaccagccattgctgcgcacctggctgaatctgagccaacgcctgaagcctggtccggcaccggaaacgccagcaaccaccgatgagccagactcaccacctccacagcagagcggtaaggggcaaaggctcaaagcgttgttgctgaaaatatggcacctgccggacagcctccactggatggaacctttgccgtattttcaccgccgttgggtgattatttttggtgctatcctgctactgtcgctgctttggccgtattccgacgataacgcgcgtccgttcccggtcaccagccaggaaaaccagataccgttacaggctcagttgcaaaacgacggccagcaaacggcaggcgaaagcgatagttggcagcgatatcagatccaggcaggccaaaccctggcgcagctgttccgtgacaacaacctgccggtgaacgaggtgtttgccatggcgcgggttgaaggcaacgataagccgctcagcaatctgaaggccgggcaagaagtgcgtatcgaacgcaatgctaacggtgtgatcaccgcgctctcagtcaccaccgtggataacagtgaagtcctgtttcgccgccagaacgatggcagctacctgcgcattcgctaatcttgaagctgatccagcagaaaatcacgcagtacaaccccttggttgtgctgtgtgtccttgctgccatacagtagggtcaacggttctcctttccttaacaacgccaccagcggctgccaggcatcattagtggccagctgttggcgatagagtgcaacaaactcatcccactggtcagtatgctgatgaaaccactggcgtaacgccgtatccggtgccacctgcttaagccagatgacgccctgcaacctttccttactcacaccgcgcggccatagccggtcagtcagatagcagtgctccggtgccgggccgctgaaatcgtagactcgctgtaagataacttctgccattttcgcctctccttgccaacagatagcctcagagtagcgcgttttacccggcgctgaaaagcaaaacgccagcactaggctggcgttttaacttggtgtactaaagccgattaagcttcagcaaccacaactacattcagctgtgcgaacacgtcgctgtgtacctggaagtgcacttcgtgctcaccagtggtacgcagaacgccgttcggcagacgaacttcgctcttggcaacttcaacgcctgccgcagtaactgcgtcagcgatgtcgcgggtgccgatagagccgaacagtttaccttcgtcgcctgatttagacgcgatggtgactgaacccagttcgttgatcttggttgcgcgagcttcagcagcagccagaacgtcagccagtttggcttccagttcagcacggcgtgcttcgaagaactctacgtttttcttggtagcaggaacagctttgccctgtggtaccaggaagttacgggcataacccgctttaacgttaacctgatcacccaggctgcccaggtttgctactttatcaagcagaataacttgcattaccttatcctctcaaagtcgttaatggacagtggccgattactgatgacgatcagtgtacggcaacaaagacaggtagcgcgcgcgcttgatagcacgggccagctggcgctgatattttgcacgagtaccggtgatacggctcgggacaattttaccactttcagtgatgtagtttttcagcgtagcgatgtctttatagtcaatctcttgaacgccttccgcggtgaaacggcagaacttgcgacgacggaaataacgtgccatttggctagtctccagaatctatcaattcaatctgctcggcatgcaggaccaatttgttcagcccgttgcgcccttgatggcaactaacgaagccttgaacggtaacctgactgccgaccgttaatctttgagttaaagcttgtgactgttgtccgctgacaaccacgggcattcggcaccatgcttgcctgctgaatccggcttccatctgcgacgatcggtgctcaagcacaaattggcagtggggtatcccggaaggactcacttttcgcaccggcgtcttgcacactgtgccagacaacaccagacgattagccgtcacgacagcaattactcttcagaatccccagcatctgcatcatctgcggtttcgttagcgaagtcttcgcggcgatcgccacgacgttcgtctttcgctttaaccatcggagatgcttcagttaccgcgtgcttaacgcgcataaccatgctacggataacggcgtcgttgaagcggaagttagtttccagctcatcgatcgcttcctgcggagcttcaacgttcagcagaacgtagtgggctttgtgcagtttattgatcgggtaagccagttgacggcggccccagtcttccagacggtgaatctgaccttgcgcgttagtgatggtagcactgtaacgctcgatcatgcccggaacctgttcgctttggtcaggatggaccataaaaacgatttcgtaatgacgcatcgaattgctccttacggattattcagcctcctgtcagggtcaaccgcggcccatggaagcaaggaacgtgtgtatgtgtgcggctgaaaaatgacgcgtaatcataccggcgcaagggagggaactcaaggactgagtaggatttattgaggtttatgcgtaaggccacgagaaatagcacgatttgctggcagaaaaagcgatgtatgccgatccataggttttaaaaatccttcaacaaaatcatcagcccactggaaatcattatcattttttttgaataaggccatcaaaatctcaccctttttaatcctgactatcggactaaagttaaattatccgccgcagaaagcgcagcgataaagggttgcagttattcaagattgataaataactttttgcttaatgaacagtatatcggcgggggggcaagtgacacgccgccgtagcaantgggccaagtgacacgccgccgtagcaaagggttaagagaggtgtctatgaaacgtatcaccatcgctaccgctatcgcgttgctgctttccgccaacgccatggccgccactgagatcaccgcacaccaggccgcagagcgccaaagcattggcttcgtcagcctcgatcaggaagtggtttcgcccgacgacgcaacgtcccaaatcaacaagattgccgatcaacgcggcgccagcgcttaccggattgttgcgctacatgagccaggcagcaccgcgtctatccacgtcagcgccgagctttatcgctaaccgaaaatgcagcaccagggaacccagccgcaccaagaggcggtcgatcagtaacagccaggccttgccccctccctcgggggctttttacagcgaatcctggaaaaaggcggcggtagcgttcaaagccccaggggtaatacgatggcgtacttccgcttcagtgaggtaggtcaaccgacgatccaggccgcgccggcgtaactcaccggccaagcgctcactctccaacgcgggcactacatcatcggtttcaccatgccataacagcagtggccgcccggcaaaactctcccaatgatgttcaacctcataagcgaccaggggcgcaagacgtgccttgagcgcgggctgctccagcgcttgaccatgcgcatccaatggcggatacaacgtctgcgccagtgaagtaaagtagcccgaccccatcaggctggcggcagctttcacccaagggtaacgggtaaatgcccctaaggtggtcattccccccatcgaagcgcccgccacgccaatgcgatccccggcaattagcccacgctgctcaaagtgcgttttgagcgcgggtaactcatcgacgttacttttgaggatttcccagaaatgcgccagccgccgtgcttcatcaccatcaaaccgctcaccgtgcatcgcacaatcgggcagcaccacccggaatccgaccttggccagcgcataggcaaaataagcgtacacctctttcgatgaggtatagccgtgatagaaaaagatcgtgggtaacggctgctcatagagccccgctggcaccgcatggatcaccgcaacgtcacccacccgctcatcatggatctcgatcatgtattccccctgtgcccaatcttctctatgatggcaaatatcggcccgaaaccgtagttcaaaccgttctactctatgctaaatagcgatgaggccagcatgaatctttcccgttcgttgatcaccctattgctgtttggtttgttatccggctgcagcgtatttaaaaccacgcccaaacccccaccgccgcctaccgctcaggcacaggagatcacccgtgcccaaaccaccgagttggagaagatggggacgatcagcgcgctagtgcatggcagcccgatgaacgtggaagccgagatccagcgcaaagctaacgccagcggggcacgctattacatgattatcatgaacagcgaaaccatcgtgccgggccagtggtattcacaggcgatactttatcggtagtgcgggctctgagagataagtaaaaacgggtgcccgaatagacacccgtaaaagatatttccgcgattactctttgattaccggcccagttacatcaccgttattggtgtatctccccgtcaggttcagttttaccccttccaggccgccgatcaccgcgccgcgccggttagttaaattctggctgttgatcgtggtgaccttgtcggaccacaattgaccgctgttggtcaatgccccgttaacgcgaatatccagcccttctctaccgtggactaagccgctgttggtaaaggctgaagccacttctactctactgctacctgttgaagatatcgtgccattgccgttatccaggcggttagccagcagcgacagataagccacacttgaaagggtgccgcggttattatccacgttgccggcatacttcatgttcaagttaccaccgctggcagcaatcagaccccgactgttgtacacccggttaccggtcatgctcagatcgcccatactgataatgcccccctgagtgtcctccggcatatcgatatgcacgcccatcactcgaccaaaattttcaccattacggttatagagagtcgccgcctttatttctgccgtcttctcggcaaaaatcagcccctcgtcattgcgcaatgtatcggtatgcacatgaacttcctgcccccccaacatgcccgcattgttgttgaccgtgctggcgtatagctccgtgctacccagctcgctacggatcacgccatagttgttattaagggcattttggatgcgaacgtcattgcccttgtccagggttaacccacccgtgcggttatccaggctgtttgcctgcagcaacagcttgccctcaccgctaacactgccatcccggttgtccatggcgttgatattggcgagctggatatcccccatggcagagatctgcccactctcgttgagcaggttactgccgttggtgtttacgttcagcatcttggtcgcttgcaaactaccggttctattggtcagtagcccactgttgatatccaacgccccagccgactcaatcaaaccgttggtgttattgagcgctgctttgtttgtcgtcagcttaaaatcgtcaccggcactcattttaccgttagcgctattattcaacgtaccgctggtagacagatttacgtgatgttgagccgctatttcgccaccacggttatcaagcgtgccgccaacggtcatcgacagatcggacaacgaagagccaaaggcaaaaatctgcccattacggttatccaactcaccgctgatgatagtggagttaccactggtggtgatcaggccattgttattgttcaactgacccgttttcagcactatacccaaggtgctgtaaatgccggtgtcattattgcggccagtattggtcagcaactgcccattggtatcgatagtgacctgtgaactggcttgcaccataccgttggtattgttcaattgcccgctattgatgctcacagagccgatggccgctatgttgccgttggtattggtaaggcggtttttatgggtattgatagtgatcccaccgttcccgccggtgattttccccctggtattattaatagtgccggtggtgttcagcttgttggcacgtgcggcggatagggtcccagaacggttatccagcacaccattaacgtccatcaccagatctgaagtggaagccgcgatggtaccggcatttcgaacgcccactccgctttctgttcccaccaaggtgatcttgccggcatacatcccccccaaagcagcaacgtcaatcccaacgccaggtctgcccaacgccgaggccagtgcagtcgcctgggtgttatccgcattgacgttattacggccagtggtcactttcaaatccttggcccagacgccggcattaatcaccaccgagcgagcaatcagatcggtataattactgtcgccgctgttcaggccactgccattaataacaatggtgcctttttccgttttatatccctgtatggcaccatcggcaatctgggcagtaccggtggtcagcgttgctctgccggcattaataaagccgcagccactacaggtaatacctgccgggttggcaataattacctgagcctgctggcctgcaacttccaccatgccatttaacacgctggcccgattagtgttgacctcattaaggatcaccgaggccgccccaccgcttaaattcgcattacccgcgagactccccgccagttggctattagccccgtcaacactgttattcagcaccacaccgtttttatcaacattgaactggttgaagatattatgtgaaacaccccctttacccgcagcgttgatattcaccacggtcgaaccattcgccccggcattaaccgcagggctagatgcctgcccggcatcggcaacgatagccgcattagccacggagacgcagccaaaagccagcagcccggcaaagtagagtggcgaaagattcatctgcagagatgagctgctcttttctttacgtatcgataattcggttgtagacgagagattactatatgtcatgctgttaattccttttacacaataggaaagtcagtagattgccgcgaacaagccgcaataaaaacaagactttcccaaataaataattagcacagattggcactcacgagccgtgcttagtctccattacattaaaaatgtaacatacaacccgttacccactcagccaattagttaagcagaacccaaaaaagggtatatcccgcacattaacgagaatcatccttaaaattacagcagaacacatcttaggcgctcacactaaattaatatcatgcgagatatttctataattaatcattcgagctgaagtcagacaggaaattatacatccaatgccatcagcatattatctgatggcatttctctctagacgataagcccgagctcctgttttagttccccatagcccgctgaagcagcgtatcgcacacctcagcaggcagcattctatccccacgataatccagcgttaaatggcaccaggcctcaccaattggcgggctggcatgttgcagcagttgggcggcacagcacagatcgaataactgctgggttaacaaacgccccatttcttcacgcggctggcgcatacgctgctgccactgccgccaagcgcgatcgaacaaccgattctgcccgcgcaccggcaacagctcctgctgcagcaattccaacgcacccggcagcttatgcaggctgcgcatcacgtccaggcacatgatgttgcctgaaccttcccaaatgctgttaaccggaacctcacgataaagccgcggcaactcactctcttcacaataaccaataccccctaacacctccatcgcttcagcgataaatggtgccccctgacggcaaatgctgtatttcgcggccggagtaagtaagcggctataaacggtttctcctgcatccccccgactttcccaggctcgcgccaaacgaaagagtaaggcggtatgccctaaaagccgtaacgccatacgggccaacccctgccgcatcaatggctgttcaataaggcatttaccaaacgcctgtcgttgcagagcatggtacagcgccaccgaaaggctgcggcgcatcagcccatggctacccaaagcacaatcgaagcgggtcataccgcccatcttgaggatttgcctgacgccatctccttcatcacccaacagccaggccgtggcgtcctgaaactcggcttcgctactggcattggaacggttgcccagcttgtctttaagccgctccaggcggatggcattgcgcgtgccatcaggtaagatccttggcagaaagaagcaggacagcccgccttccgtttgcgccagcaccagatgggcatcactctgtggcaccgaaaagaaccatttatggcccaccaggcgataagcctccccattgccacgactggcgagcggcacggcgggggggggattgctcagcacgtccgagccgcntggtattgctcagcacgtccgagccgccctgcttttccgtcatccccatgccgatcaacagcccgcgcttttgtgcaccgggcaacagatgagggtcataacgatcggaaagtaacggggttagccaggattgatactcctttggcagggaacgctgtagcagtgggatagcgccaaaggtcatggtgattgggcagagcgtgccggcctccacctgagcgtgcaacacaaagcgggcggcgcgggccaccaaggagccaatacgggcatcttcctgccacggcaggttatgcacccggttagcgaccagcccctgcatcaggatgtgccaggctggatgaaagcgcacgtcgtccaggcgttgcccagtagcgtcatagcgcagcaactctggtgggttggtattggccagccgccccaactccagcgactcctgcgtgcctaactgctgcccaagcgaggccagaacgtcactatcccaacccgccaactcgcgctgcaacgcttcacgcaacggcgtatcggacaggaagagattgctgttgcccaagggcttgggttggttaaagacggtatgcgtagtccagaccatgaatttgctccctgattaacgcttcaggggtaattatggtcattagctggatttctgccgctggcgggatcacaagataggagattagaggtaggggtgacagatttcacccctattaaatcatcagctgcgctgacgcaccgcttcaaacagacagacaccggtcgctaccgagacgttcagcgaggaaaccgtaccggccatcggaatgctgatcagttcgtcgcaatgttcacgggtcaaacgacgcataccttcgccttccgcgcccataaccaacgccatcgggccggtcattttgctttgatacagcgtgtggtcggcttcacccgccgtgcccacgatccagatgttcatctcttgcagcaaacgcagggtacgagccaggttggtgacggtgatcagtgggacgttctcggccgcaccgcaggccactttcttcgccgtcgcattcagttgggcagagcgatcgcgtgggacgatcaccgcatggacaccggcagcatctgcactacgcaggcaagcccccaggttatggggatcggtaacgccgtccaacaccagcaggaatggcgtttcaacgctttccagcagcccaggcaaatcgttctcctgatatttccgcccttcacgcacccgcgcaataatgccctggtggacggccccttcgaccttctcatccagccattggcggttagccacctggatcacaataccggttgcttccagctcggcaatcaaaggctgtaagcggcgatcgtcacgccccttgagaataaacacttccaggaaacgttgtggatcgttgtctagcagggctttgacagcgtgaataccgtagataatttcgctcatgatgctcttttaactgtgcggccgggatgacccggccggggataataacgtgcggcaggttaaccctgctcggcacctttcttcttgctggcacgcttggctttggtcgctgccgctatctttttggttttatcagacgcttttttggcttttgccttcggatcggttttcgctttcgccttcgggtctggcttcaccttgtctgcgggtttggccttggccccatcttttttacggaaggcgctgtctggctcaaagttggcaggcgtcttgccgccacggcgtttacgttgagcctgactgcggcccgctccggcaccgtcgcgcagcgtacgctggccgccattcttggcacgttcgcgctcggttttgccttcaccacgcggtttgcgggtgctggaaaccagggcgaagtcgatcttgcgttcgtccatatgcacggcctcgacgcggatctccaccgtatctcccaggcgatagaccatgccggaagattcgccgatcagacgctggccgatattatcgtagcgatagtaatcgttatccagcgtggacacgtgtaccagaccatcgataaacagatcgctcaggcggacgaagaaaccaaagccggtgacgctggcaataacgccgctaaacacttcaccgacgtgatcctgcataaagtcgcacttcaaccagtccgccacgttacgcgtagcttcatcggcacggcgctcggtcatcgagcagtgcatacccagttgcagcatctcttccagatcgctgtgccagcctccggttggcgtccagcgctctttctgttcgccttgctccttcgccaacacgtacttgatggcgcggtgcagtgacaggtccgggtagcgacggatcggcgaagtaaagtggccataagaggccaacgccaagccgaagtggccacggttttccggatcgtagatcgcctgtttcatcgaacgcagcagcatggtttgcagcatttcacggtccggacgttccgatacttcatccatcaaagtggcgtaatctttcggctgcggcttcaggccgccacccagcgtcaggcccagctcgctcaacacgctgcgcaatgcggaaatgtgatcgtcacttggacgatcgtgcacgcggaacagcgcgggttcgttatgcttctcgacaaagcgtgccgccgcaacgttcgccatgatcatgcactcttcgatcagtttgtgcgcgtcattacgtaccgttggttctacgcgttcaatacggcgttcagcgttgaagataaacttggcttcttcggtttcgaaggcgataccaccgcgttcggcacgagcctgatccagcactttatacagcgcatgcagctcctgcaggtgtttgaccaacggatgatactgctcgcgcagctcctgatcgccctgcaagatatgccagaccttggtgtaggttaagcgcgcatgggagctcattaccgcttcgtagaatttaaacgaagacagacggcccgatgcggagatggtcatctcactcaccatacacaggcggtcgacctgtgggttgagcgagcacaggccgttggaaagcacttccggcagcattggtaccacttccgatgggaagtagaccgaggtgccgcggctacgggcttcgtcatccagcgccgtgcgcgggcgcacatagtagctgacatcggcaaccgcgccccacaggcgccagccaccaccgcgttttttctcgcagtacacggcatcatcaaaatcgcgggcgtcttcgccatcaatggtgaccagcggcaagtgacgcagatccacacgccctttcttggcggcttccggcacctgctcactgaggtcggcaacctgcttctccacctgaggtggccaggtatgcgggatctcatgggtacgcaatgcgatatccaccgccatgctggtccccattttatcacccaggatctcgacgatcttgcccacggctttggtgcggcgcgttgggcgctgggtcagctcgaccaccaccataaagcccatccgcgccccgctgaccgagtcggcagggatcagaatatcgaagctcaggcggccgtcatccggcaccacgaagccggtaccggcatcggtgaagtagcggccaacaatctggctggttttgggtaccagcacgcgcacgatacgcgcttcacggcggcctttgcgatcttcgcccagcggttgagccaacaccacatcgccgtggatggccattttcatttgctcggcggagagataaaggtcgtctttacgcccttcaacccgcaagaagccgaagccatcgcggtggccgatcaccgtgccacgcagcaggtccagacgctccggcagggcatagcactggcggcgggtaaagaccaactggccatcacgctccatcgcacgcaggcgacggcgcagggcttccagcgcttcttcgccggataaattcagttcattgcccaactcttcgcggctggccggcgtttcacgtttcgccaaatgggccagaataaattcgcggctaggaattggggattcatatttttctgcttctcgttccaggaatggatcttgtgacattgaggttcctccgttgtcatcagcagggtgtcgctgagccttgtcttctcagtaacgctttattcgacaagcaaaagcttgtagagcggtgaattgtcttcgaccatgtcggccaatgtgtgactatccagctcctcaaggaaattctttaccgcctgctggagcacttgcttcaaacggcaggctggggtgatatgacaaaaatcgctgctgcagttaaccaacgaaagcggctccagcgcccgcaccacgtcgccaatacggatgctctcagccggtttacccaagcgtataccgccgtttttaccccgcacggcggttacaaagccttcacggctcagctgattgataatttttaccatatggttacgggaaaccccgtacacctccgtaacctcagagatgctggtcattttgtccgcaggcaatgatgccatatagatcaatgcccgtaggccatagtcagtaaaacttgttaactgcacgtttacctctgggtatctgccgattttcggcgattttctttactatcttattggatgataaaccagccagagagttcgcagctaattatttagtacatagccgactctcaaccggagcaacgaaaggattttgtgaggtgaaaacgccatcggggaggatacatgaggcaaacaaaccgggacttggcccggtttgtttggtgacagtagagcaaacagattatgcgtcgaacggatcgcgcaggatcatggtttcgctacggtctgggccagtagagataatgtctaccggtacatcagtcagctcttcgatgcgtttgatgtagttcagcgctgcctgtggcagtttgctgtagtctttcacaccaaacgtcgtttcgctccagcccggcatggtttcgtagattggctcgataccttcccaaccttctgcagccagcggcgtggtggtcatttcgcggccatccggcatgcgatagcccacacagatcttcacttctttcaggccgtccagcacgtccaacttggtcaggcagaagccagacagggagttgatctgcacggcacgacgaacggcaaccgcatccaactagccggtacggcggcgacggccagtggtggcaccaaactcattaccctgtttgcacaggtattcgccggtttcgtcgaacagttcggttgggaacggacctgcacctacacgggtagaataggctttcacgatgcccagcacgtagtccacgtaacgcgggccaatgccagaaccggttgctacgccaccagcggtggtgttggaggaagtcacgtacggataggtaccgtgatcgatatccagcagagtgccctgtgcaccttcgaacatgatcagatcgccacgcttgcgcgcaccatccagcagttcggagacgtctactaccatcccggtcaggatatcggcaatcgacaacacatagtcaagggtggtctggtaatcgacggcttctactttgtagtagttaaccagctggaagttgtggtaatcgatgatgtctttcagcttggtggcgaaggtggctttatcgaacaggtcaccaacgcgcagaccgcgacgggcaactttgtcttcgtaagccgggccgataccacgaccggtggtgccgatggccttggcgccacgcgctttctcacgcgcattatccagagcgacgtgataaggcaggatcagcgggcaggcttcagacagtaacagacgttcgcgtaccgggatgccgcgcgcttcgagttcacccatttccttcatcaacgcgtctggcgccagaacgacaccgttgccgatgacgctggtcacgttttcacgcaggatacctgaaggaattaaatgaagaacggttttttcaccgttgataaccagagtgtggccagcgttatggccaccttggtagcgcacaacatattgagcccgttcagtcagcaggtctacgaccttacccttaccttcgtcaccccattgggtgcccagtacgacgacgttcttacccattttaaaatcaccaggttgcttaaaaatggattctaccaccctaattcttcagtttcagcacttttagcatacgattgcgtactttttcggctaaactttaaacccccgtgcgtgcacgcaacatgtagtagatcacacagcctgcaaccactaatcccccaccaaaacgccgcagtgtggcatcgggcagttgcgacatcgtctggaccattttacgccaagcctgtgggaacagcatcggccccagcccttccagcaccaaaaccaacccaagcgccagccagattgtcgaattcatccttcccccaaaaaagaaaggcccgcgtttaaacgggccttggttctccccctgctctttcaaaccatggcctgaaagctatcggggatcgccatcatgctgacgttatctgttgcgcgtagcaaccggcgacttcatgtagcggaagaaatcgctgtccgggctcagcaccaacacgtcctgattgccagggccgaagctggtttcataagcacgcaggctacggatgaaagcgtagaaatccggatcctggctaaaggcatcggcaaacagcttggccgcttccgcatcgcccgcaccgcgagtgatacgtgcctgacgctcggcttccgcgatggtacgagtcacttcgtagtcggcggtcgctttgagcttctcagcttcttctttaccttgtgaacggtgacgacgggctaccgcctcacgctctgcacgcatacgctggaagatcgcatcggacacttccgcaggcaggttgatctgcttgatacggacgtccaccacttcaatacccagggctgccatgctgttcgggttaaccgctggctgtttgccattggtttcacgctcaacacgggctgcggcagatgcgatagcgtcatcggcttcgctggcggcggcttcttcgccgtcgcccacggtaccggtgttcagcgcctcacgcacgtctgccatcagacggccacgggagtcagtcacgatgtcacgcacgtccaaacggccaatctcggaacgcagacggtcgttgaacttgcgtttcagcagcagttccgcctgagaaacatcaccaccaccggtcgccaggtagtagcggctgaaatcactaatacgccatttcaggtaggagtcgacgatcaggtctttcttctcgctggtcacgaagcgatcggcctggttgtccatggtctggatacgggcatccagcattttcacggtttcaataaacgggatcttgaagtgcagacccggtgcataaaccagcggtttgttttcgctgtcgcgcagaactttactgaaacgcagcacgatgccgcgctcgccttcctgaaccacaaacattgaggcgtaaagggctaccaacaccaccgcgaggataactatgaaagacttacgcattgattattctctccctacgcgtgtgttgtcgctacgctgcgcattagcccggcgttggtccatgatggaaccactgctggaactgttagtgctcgcatccgatgaaggagtcgaggctggcgcaggggcgagaaggttctgtccggcatctttgctgccttcggtaaccggcttaccggcaccgcgcagcatttgatccagtggcagcaccatcagactgttattgcctttgttgtctgccaccaacaccttacgggtgtggctcaacactttttccatggtttcgaggtacagacgctcacgggtaatttccggtgcggctttgtactccggcaacagcttggcgaaacgagcaacctcaccctgggcttccagaacggtctgggcctggtaggcgcgcgcattttccagcaggcgctgtgcagcaccgttggcacgcggctgaacttcgttggcgtaagcttctgcttcacgaatggattgctgctcgttctcacgtgcggcgatcgcatcatcaaacgcggctttcacctcttccggcggacgtgctgcctggaagttgacgtccagcagagtgatccccattttgtacggacggatggtttcttccagtacacgctgagtgtcgctacggacgatggtacggccttcggtcaggatcttgtccatggtgtatttaccgataacaccacgcaatgcgctgtctgtcgcctgtctcaggctgtcgttggcatcggttacgctgaacagataggctgccggatcggaaacgcggtactgcacgttcatctcgacgcgcaccacgttctcatcggaggtcagcatcacaccggacgcggacaggtcacggaccgactccacgttaaccgggcgaacctgatcgataaacgtcggtttccagttcagacctggctgcaccagatggctgaatttaccaaagcgagtgaccacaccacgttcggcttctttgatggtatagaaaccgctggcggcccagatcaccaccaccgcaaccgcagcaatgccgacaatcttgccactgaagcccggcccgattgaacccgttccaccgctgttattgccgttggagcctttgccaccgccggtcaggctgctcaatttcttgctcagcttgcggaagatatcgtctaaatccggtggtccttgatcgcgaccgcctttattgttaccgccagagttgccgccattattattgctgctcccccacgggtcgcggtcctgtccgttattaccgggctgattccacgccatgttttagctccattattctgtgattgggtacttcaggctaatgcttagcccactcttctattgagcgggcacacaaatgtaacaggatatgatcatacgataaagttaatcagttcctgttcctgcttgcagaggcgacgccactccacgatcggcatacgcaccaccacgccgatactgccgtcctcttcattccactctttttcgatcgcctgaagctggtagaaacggctacgaagacggccagcctgtggcggtaagcgcagctcataatgcgcgatttcccccgataagcgctccgtcaacgcctgaaatagcaacgggataccttcaccgctggcggcggacagccacactcggatcggtaaattttcctcgttgcgatcgatacgcgggacaaagtcatccagcatatctattttgttcatcactaacagtgtagggatctcatccgactcaatctctgccaacacggagttcaccgcttcaatgttttcatccacccgggtatccgcagcgtcgatcacatgtaacaacagagaggcctggcgcgtctcttgcagtgtcgctttgaacgcggcaacaagatcgtgcggcaagtgccggataaaacctacggtatccgccaacacggtatcgcctacgtccgccacgtcaatgcgccgcagggtaggatccagggtggcaaatagctggtccgccacatacactccggcagacgtaattcggttaaacagggttgatttgccggcgttggtataacccaccagcgatacggttggcacatcggcacgggtacgtgctcgtcgcccttgatcgcgctgcttctctacccgctcaaggcgacgcaggatcaggctgatacgatcgcgtagcaggcgacggtcagtctctaactgggtctcccccggcccgcgcaggccaatcccccctttctgacgttcaaggtgagtccaaccacgaaccagacgagtggcaatatgacgcaattgcgccaactctacctgcagcttaccttcatgggtacgggcacgctgggcaaagatgtcgagaatcaacccggtgcgatcgatcacccgacattcacacaggcgttcgagatttctctcctgcgctgcggaaagggcgtgatcaaacaggacaacagacgcgccgctggctttcaccgcatctgcaatttcttcggcctttccttcaccgacaaagtattttgggtgaggtgctttgcggctaccagtaaccacttgcaaagcctcaacgcccgcagaggacaccagcgattcgaactcactgagatcttctgtatctttgtcttgcgagaaatagatatgaaccaggacggcctgctcaccggcttcataacggtcaaacaagcgtgcaacctctcaaacggaacaaaaccgcgagtttgggggacataaacagcactgcgctgcttatgcaccccgtcatggttgactcgcaacgcgctttattcagcgtcatcgctttcctgctgcggctgttgcggcgcagacgggttgttaccatggtgataattgctggtgccgccgctgctcggggtgttgctgtggtgcgataccgggcgcgatggaacaacggtagagatagcgtgcttataaaccatctggctcaccgtgttcttcaacaggatgacaaactggtcaaaagactcaatctggccttgcagcttaataccattcaccaaataaatagaaaccggaacacgttcacgacgcaatgcgttcaggaacggatcttgcaaagattgccccttagccattctatcttttccttatttgtttgttgtttttaaccaagaacctgtcggctcaaaataaacgacctaaaaaatttgcgcgctgaatactcatcaattgtacacaatcactcaacctatgcactaacaacctgtgttaccgagtctaaagcctctcccggcttttcactgtccaaccaccgaaccgactcccaaccccgtaaccaggtcatctggcgtttggccaactgacgtgttgcgcaaatacctcgaaaaaccatctcatcgtaactaatctcgccagaaaaatatgaccacatctggcgataaccgacacagcgaatggaaggcaaatccgtatgcaaatcaccccgtgcaaaaagtgcacgcgcttccgcctcaaaacccgccgccaacatctgattgaaccgcagctcgatacgttgatgcaacaactcccggctgactggcgcgatcgcaaattggtgaacatgatacggcaacgattcacccgaaattttagtcagttcagttaaagttttacccgaaatcaaaaaaacttccagtgctctggagagtctctgtggatcattcggatgaatacgtaacgcggaaaccgggtctatcgcctgcaattggcggtgcaaagcctcccaaccgtgttccgctgcctgctgctcaatctgctcgcgcacggcgggatcggcagaaggtaacggcgataaaccttcgagtaacgccttaaagtaaagcattgtgccccccaccaacagcggaatacgcccagcggcagtaatatcagccatttcgcgcagcgcatcggcacgaaaatcggctgccgagtacgcttgcgcaggatcgcggatatcgatcaaccggtgtggcgccagggccaactcttccgccgagggtttggcggtaccgatatccataccgcgataaatcagggcggaatcgacactgatcagttcgacgggcaagcgctcacgcagcgccatcgccaaggcggttttgcctgaggccgttggccccatgataaaaatggctgggggacgaggggtcatttcaatttcagtcatgcttaagcgctgccaatgcagcctgcaaatcaacgggttgtaaaagagcggcaggaggggatttgaccagttgcgggcaaagtcgttcaacttctgtcaacaattgtatcgcttgcgagctgttccacacttcatgttcgctgcctaattggctggcgatccagatggatagcaccgttggcgacatctcctgatgttcggccagatagcctaacagctcgggtatcaacttttgtaaattttgttggcgtaatggtaaaggtactgcgcgcaaagtcacacgaccgtgatcggattgcagctccaaccccattttgaccagcagcgcctgatgttgcacgcaggcggccgcttcatttttattcaacgtcagcttaatcgggatcagcagcggctgtggccgtaatccctcttcaggcgggcaaagctgcgcctgacgcagccaacgttcggccatggtcaggttcagtaacgccaactgctgacgctgttccaccagcgcatagctcggcgggcaaatcatcagaacgcggccaaaactgtgctgactaccggcgagcggtgtttcctgcacggcgttaaccggcgggaacagcggctgttttaccgtatctgctggcggcgtagcctgcaacagcttgccatacagctcgccttcacgcttttggtaacccgcaccggcctgataggctggctgcggggcacgttcacgggcagcggagggttcagcaggctgacgttcacgctgtggcgcaggctgggagaagtggttgccaccggcggcaacgcggttctccggctgccagacgggagcctcctgcgcagcggactcttcagccaatggcagcgcgacattacccgcctgctgcaacacagtggtaaccgcctgatagataaaatcatgtaccagccgagcctgatgaaaacgcacctcatgcttggccggatggacgttgacatccacctgatgcggatccacttccagatacagcacataggcaggcaactgatcgtctttcaactgatcctgatacgcctgacgaatggcatgattaatcagccgatcgcgcatcatccggctgttgacgtagcaatactgcatttcgccaagctggcgcgccccttgcggatccgccacccagccgcggatgctgagatcgccatgctgccaggaaatcgccaacgcatgctgcaagaaggcggggccacaaatgctggccagacgccgctcatgctggctttcttcttttgccgcgcgatactgacgcatcagcttgccgttatggctgaggttgatcgccacatcgaaacgcgccagcgcaatgcgccgcaccacttcgtcgatatggccaaattcggttttttcggtgcgcatgaacttgcgccgtgcgggggtgttgtaaaacagatcgagcacttcgagcgtgctgcccaccggatgagctgccggtttgacggtgaccgcctgatcgcgcccttccgcgtaggcttgccaggcttcgctctgttccgccgtgcgtgaggtcaacatcagacgggacaccgagctgatactggccaacgcttcgccgcgaaagcccaggctgactatggcctccagatcgtcaagcgtactgatcttactggtggcatggcgcgccagggccaaggccaggtcggctttggcaatgccgcagccgttatcacggatgcggatcagtttggccccgccgcgttcgatatcaatatcaatccgcgttgccccagcatccaggctattttctaccagctctttgaccaccgacgcaggccgttcgaccacttctccggcggcaatctggttggctagctgtggcggtaacacctggatagacatggggctccctctgttgttggcatcaagcctacggaatgatcagcgtccgatccagcggcgcaacatccgactttaatttgttaacccgtttaagctcgctgatgctgacgccatatcgcgcggcgatagatgacagcgtatcaccgcgagtcaccttatgtttgctcggtttggtgctttttgccttggcctgaaccggtactgccgccgttttcccagcggggaccttcagacgctgaccaacccagacgccgtcttttttcagcttgttcagctcacgtagcgccgccatgctggtgccatagctatcggcaatgccggaaagcgtttccgcccgcttcaccacatggatctgcgtttttcctacgctggcgctacttctggccgggctggtcaccggctcaggctgtctgagatcgtctgttgtggagttaaccgccgctgcgacgtccagcgggcggttttccacctttgggtcggcttgtagcggatgcgccaggaaataactgcgcaggccgttgtggatcgcccgtgcaattttatcctgatatgcgctactgcccagcagtcgctcctccgtgctattactgataaacccggtttccaccagcagcgatggaatatccggtgaacgcagcactcccaggctggcgtgttccggacggcgtttgtgcaatgaacctacgacctgtaactgttgcaagaccttaacggccacgtcataaccgacgcgctgcgaatgaccgaactgcagatccaacaccgcctggctcagataagggtcggcctggctgttggccaacagatcgcccgcgccacccagcagttcggactgtttctcatgctgttccaaccaaccggccatctcgctgttagcccggcgattggacaatacccaaaccgaagcccctttggcgctgcgattcggcgcggcatccgcgtggatagacaccaacacgttggccccctgcttgcgcgccacgtctgaacggcccatcaccgaaatgaaataatccccgttacgcgtcatcaccgctttaaacatcggatcggcatccaacaacgcacgtaggcgatgcgcgatggcaatagtgacgtttttctctttcagaccgtttggcccgatagcgccaggatcttgcccaccgtggcctgcgtcgatcgccaccaccacccgatcgccagaaccggccgacactcggctgctacgtggggtaatgctggttgccgtgcctgataccgcagccgacttcggagtaaatggattggcgttactcgacgtaaccggtgctttacgcactggctcagtcaccaccggcacaggcaccggtgccttacggacagtgtttgtcgtcgttttggcttctgaggtgatggtgaagacgacgatgtaactgttgccctcttgacgcgtcgccacacgggttttggcacgttgggttaaatcaaacaccaagcgtacgctttgtgcatctttcggcttactggaacgaatgctttttaccaggttttggccgctgaagttcaacggcaggccgccccctttgcccgcttgattcacgtccaggaccacccgttctggaccatgtatggttgagaagctatacgagggagggccagtaaagctcactgacaccgtggcttcacgctgagcattggtcactttgacgtcggagagggacgatgccgcccaggcaccaaacggccccagcaacgcgagcaaggcaatcacagcaaatcttcttaacccatacatcattgctgcgtcatccttgttgcctctgaatactttccaataattgttcgccataggcggaaaccgcctggagcttcgcctgacgcccttcgtcttggtaactgagatgcagttccagatcgggatcgggcagcacgccggtaccctgctgcggccactccaccaggcaaatcgagtcctgggcaaaatagtcgcggatacccataaattcgagttcttccgggtcagccaggcgataaagatcaaagtgatagaccgccagcggttgcagcgcataaggttccaccagcgtataggttgggcttttcacattgccctgatggcctaacgcctgcaaaaagccgcggctgaaggtggttttaccggcacccaaatccccataaagataaatcacgctggcacgatcgcacgcctgggccaggacggcccccagtgcgactgtggctgcctcatccggcagcggtaaaacgagttctttcattcgataatgtctattttgccaactcagggttaacgtaatgagggatcaccgccagcagatcggtggccagtaatccccttgttccttgttttgccgcaacatgatccgccgctgcgccgtgcactacgcagcccgcgcaggcagcatcatatagcggcagcttttgcgccaacaaaccgccaatgatacccgacagcacatctcccatgccaccggatgccatgccagcattgccaacgtcggcgatcgccatctgtccatgctcatcagcgatcaaggtccctgcgcctttcagcaccacaacgccgccgtattgtgcaaccaacctgcgggttgcaagtaagcgatcactctcaatatcagcggtgcggcagctcaataatcgcgcggcttcaccaggatgcggggtaataatacgattctgacgcttctcggggtgtaatgccagtaagttaagcgcatcagcgtcccataatgttggtttatcactggcttgcagctgttgcaacgcattgcggccccaatcgccctggccaagccccgggccaatcacgaccacatcagcccagtccagcgcctgttgcagaatatcgtcactcaggcgctgcaccatcaactcaggccgggcggtcagcagcggcccaatgttctcactgtgagtaagcactcgcaccagtccagccccggcacgcagtgcggcttccgcagccatgcggatagctccgccaaaaccgtgatcgccaccgaccaacagtaaacgaccatgatcccctttatgagaacaaggacggcgaggtttcagccacctggccaaatcgccagccgtaatacgctcgatctgtggagactgtgttgccaaccaatccaccagtcctagcgtactgtaatgcagttgccccacccaatcacgcgcctgcccggtcagcaaccctggtttgagtgcaataaaagtcagcgtatgtgccgcacggatcgagactcccggcacggctccgctttcagccagcaggcctgaagggatatccaaagccaccactggcgcatcggctcggttggccgcctcgatcagcgcatcatagggcgctctgggggccgcccccaacccggtgcctaacaatccatcaatgatgagatcaacatcctctggccaacggctggtcgcgggcaggacttctccgccgctttccagccaggcttgccgggcagtggcggcctctggtggcaatggacgaacgccttcgcaggcaatgagcgtcaccttgatgcccgcagcacgggccagacgagcaaccacataaccatcgccaccgttattgccatgcccacacagcaccagccaatgcctgctggccggatagcggtcgcacgccagctcataagccgccgcaccggcacgctgcattaacgaatacaaagagaggccaagcgttgcggcagcagcaggttctgcctggcggatccagtctgcagaccaaacagagtgtggtaaactggaacagtattgtttctcactatggcccgtcatgacacaccccctcgatctcgatcaactcgcccaacatatcaagcaatgggggcaatcgctaggattccagcaagtggggatctgcgataccgatctcagcgcggaagaacccagattgcaggcgtggctggataagcaataccacggcgagatggagtggatggcacgccacggcatgatgcgtgcacggccacatgaattattacccggcacgctgcgggtgatcagcgtgcgcatgaactatctgcccgcgaaagccgcgttcgccagtacgttaaaaaccccgcagttgggctacgttagccgttatgcgctgggacgtgattatcacaagctgcttcgccaacggctaaaaaaactcggcgatcaaatccaggcttattgcggtgaactgaatttccggccctttgtggattcggcccccatcatggagcgagccttggcctcaaaagccggcatcggctggggtggtaaacactcactgatcctcaaccgcgacgctggctcctggtttttcctgggcgagttgttaatcgatttgcccctgccggtggataagccgcaggaagagcagtgtggccgctgtgtcgcctgcatcaccacttgccctaccggtgcgatagttgccccttacaccgtcgatgcccggcgctgcatctcctacctgaccatcgagctggaaggcgctattccagaagaattccgccctctgatgggcaatagaatctacggctgcgacgattgccagctcatttgcccttggaaccgcttctcgcagttgacggatgaagacgatttcagcccccgcgctgcgctgcatgctccgcaactgatcgagctgtttggctggaatgaggagaagtttctccgtatcaccgaaggctctgccatccgacgtatcggccatttgcgctggttacgcaatatcgcggtagcactcggcaacgccccttatctggatcagatcgttatcagcttgcagactcggcaaggtcaggatccgatgctggacgaacacatcaattgggcactggctcaacagcttgcacgccgtgaagccctggcggttgaggtgcagactacgcagaaaaaacgtttaattcgggcggtcgagaaaggattaccgagggatgcttagaaaaccctcagactctccctgtggatttgtgcataaaaataaaaatgcgttgtctttcaagcgtcacaaaaagagcaagtgatcgagataacgttttataagaaataaatattgatgattatcaatgagatataaatttcatttgtgcaacgttgcaattttgcacagaaggtattatgtacagaaactgtggataactctgttcacaacatattttctgagtatgtataaccgagcgaaagtcacaccggaagcggcgtaggattgaatgtaaactggagataaaattggagcgggaaacgagactcga

SEQ ID NO: 189 - DNA, 114570 bp, unknown
  Altogen  635822 strain
  misc_feature (12091)..(12091): n is a, c, g, or t
ccgtgccacgttggtattgcggtgtcttccttggcgtgccgaagcgctgaacctgcatataacaccgcatcagatccccattccaaagggcgaggggacctgtccgtgccacgttggtattgcagtgttttggcgatcaatgccgctatttactccaaactaaccacaacactgcatcagctccctctccttggggagagggttggggtgagggagaaattacggtgatttaaccgataaccaataggcggttttcctaggatagagtgccgatttaatagcaaacaaccttgatgtaatcgatatttagcgaatattcatactttatcgattgcggtctcgtttttaaccgaagtgttttctggccgtatcaaagtgatagctggcgatgtttttttgataattgattctattagcgtaaccgtgatgattaagcgactgccggcactgatttttattctcacttgcgattgtgagcccgttcacaaataaaattaacaattagaactgcctcacgaatttaaccgctgcccaaccccgtggggagatttggcctgattgttgctgcgttatgcgtaaccgatgtgaaaaaccgcccccaggtttttactcactcatcattcaggcatttcgtcgcaaggagataaagctatgggagatttaatgcgtcccgttccgttcaaggcgctgttaacccggattttcgatgaatatcatgagagccggtctatttttggtattccagaaaagcagttttatcgtaaacatgacgatcggcggattaacgtctttaacgaaagttgtgaaactccgcttggcccagccgcaggcccacatactcagctggcgcagaatatcatcgtctcctggttgaccggcgggcgctttatcgaattgaaaaccgtgcagatcctcgatcggctggagctggaaaaaccctgtatcgatgccgaagacgaatgcttcaacaccgaatggtcgaccgagttcacgttgctcaaagcctatgatgaatatttaaaagcctggtttgccctgcacctgttggaacagatgtttgatccacgggccaagggggaaagtaaatccttcatcttcaacatgagcgtgggctataacctcgacgggattaaacagccgccgatgcaggactttatccataatatgatggactctgcacagcacccgaaatatgccgagtatcaacatattcttgccgaatgggttaaggacgagggctttattagccagttcgctttatccgaccagcgcggggcattggcacagctgccagagcatattcccgcgcaattggtcagcggtattaccctttcgaccatgcacggctgcccgccagatgaaattgaagccatctgtcgctatatgctggcagaaaaacggctcaatacctttgtaaaattaaacccgacgctgctgggttatccgcgcgtgcgttccattctggatagctgcggctttgattatgtcgggctgaaagaagagtctttcgagcacgatctcaaactggagcaggcgattgcgatgttgcaccgcctgaccgccttggggaaacagcagaatttaggcttcggggtcaaactgaccaataccctgggggcgatcaaccataaaggcgccttgccgggcgaagagatgtatatgtccgggcgtgcgctgttcccgctttccatcaacgtggcggcggttctctcccgtgaattcaacggggagctgccaatttcctattccggcggggcaagcaagtttaacgttcgcgagatttttgacaccggcatccggccaatcaccatggccaccgatttgctcaagcccggcggctatttacgcctgacggagtgcatgcaagagctggacgcttccgatagctggccgatgacgcgcatcgatgttgataagttgcaagcgctggcagacaaggccgtcagcatggagtacacccagaaacactggaaatcaacggatcgcattgacgccggtggcccgctgccgatgattgactgctacgtggctccttgcgtcaccgcctgcgccatcaaacaggatatcccggaatatatccggctgctgggcgaacagcgctatgccgatgcgttggagctgatttatcaacgtaacgccttgccagccattaccgggcatatctgcgatcaccagtgccagtacaactgcacccgtcttgattacgacagcgcgctgaacattcgcgaactgaaaaaagtggcgttggagaagggctgggatgagtatcagcgccgctggcataaaccggcaggttctggcagcaaacgcccggttgccattttgggggctggcccggcgggcttgtctgctgggtacttcctggcgcgggccgggtatcaggttacgctgtttgagcgcgaggccaatgcgggcggggtggtgaaaaacatcattccccagttccgcattccggcggagctcatcgagcacgatatcgacttcgtggccgcacacggcgtgaagatggtttatggctgcgatcccgatctgaccgtcgacaagctgcaacagcagggctttgactacgtgtttatcggcatcggcaccgataaaaacagcggcgtgaagctggcgggtaataaccgcaacgtccacaaatccttgccgttcctgcgcgatttcaacctcggtaagcccatgaacctgggcaaacacgtggccgtggtcggtgctggtaacacggcaatggactgtgccagggccgcattgaaagtgcctggcgtgcaggacgtcaccgtgctgtatcgccgcacgctcaatgaaatgccagcctaccgcgaagagtatcaggaggcggtagaggacaacgtgcagtttatgttcctcaccaacccggaacactttgatgccaacggcaccttgacggccagagtgatggcgctgggagatccggacgagaagggccgccgccgcccggttgccaccgaacagaccctgacgctgcagatggataccttgatcaccgccattggcgagcaggctgatgaggaggtgctgcataagctgggcgtaccgctggatgacgcaggctatccgcaggtcaacaccgccactggcgaaaccacccggcctaatgtcttcctgatcggcgacgtgcagcgtggcccgtcatccattgtcgctgccatcggtagcgcccgcaacgccgctgaaacggtgctggcgcgggaaaacgtcaaaacccatcacgccgataaatactggtcaaacgtcgatccggcggaaatctatcgccgtaaaggcactatttcagtagcgctggtggataaaaccgagcgagaagccttcgtggctcaagaggcccagcgctgcctggaatgtaactacgtgtgcagcaaatgcgtcgacgtttgcccgaaccgcgccaacgtatccattgccattccgggcttccaggatcgtttccagaccctgcacctggacgcttactgcaacgaatgcggcaactgcgcccagttctgtccgtggcagggtaagccatacaaagacaaggtgacgatctacagcctgccgcaggactttgccaacagcaccaatccagggttcctggtagatggagcacaggtcagcgtacggcagaacggtaaggtttaccaactgcagatcgatagtgacggccagcttgagcaagtgccgtcggagctggaggagatgtgccgcattatcagccatgtgcacactcatcatcattatctccttggccaggtggaggtgtaatcatgctgatattaaccaatgcaaccggcgtgcagctcgaccccgccagcgtacagcacggtatcgatatcgccattgaaggggcgttgatcaaagaggtgggccaagggttggcggccaaatatccccaggccgaagtgcgcaatatgcacggcaaatgggtgatgccagggattgtgtgtgcccacaatcatttctactccgggttatcgcgcgggattatggccaacattgcgccaagcccggactttatctccacgctgaagaacctgtggtggcggctggatcgggcgctggatgaggaatcactgtattacagcggcctgatctgctcgctggaagccatcaagagcggctgtacggcggtgatcgatcaccacgcctcgcccaactttatcgccggttcgctgaaaaccctgcgcgcaggctttatcgagaccggtctgcgcggcatgacctgttttgaaaccaccgatcgtaacggcggggagcgagagctgcgtgctggcgtggaggagaatattgcctttgcccagttgatcgacgtcgccaaaaaagccggtaaggagccttacctggtggaggcgcatattggcgctcacgcaccgttcacggtttctgatgccgggttggagatgctgcaagcggcggttaaaagtaccggccgtggtctgcatatccacgctgccgaggacagttacgatgtctcccacagccacgacaaatatggcaaggatctgatcgagcgcctggcgcaatacgacctgatcgggtcaaaaaccttggtcgcgcacggtctgtatctgtctgcggcggatattgagctgatcaaccagcaggatgccttcctggtccacaacgcccgctccaatatgaacaaccacgtgggctataaccatcaactggagcagtaccgcaacctggcactcggcaccgatggtatcggctcagacatgtttgaagagatgaagtttgccttcttcaaacacagtgatgcgggtgggccgctgtggccagatagtttcgcccgcttcctggccaacggtaaccaactgctggcgcgcaactttggtgcccatttcggttgcctggccgccggttacaaagcggatctgaccatctgcgactacccgtcacccacgccgctggcggcgcaaaatatcggcggacatctggccttcggcatgggggctggcagcgtcaacagcgtaatggtggaaggccgcatggtctatcaggatcgccagttcccgttcgatgtggaaccgatctatgcagaggcgcgcaaggtagcggccaagctgtggcagcgtatggatgccttgaattaaaccggtcgccgccctgcgaacaccgggtgcggctgacattgatgagggtgcaatatgattgagcaattctatcggccaggatcggtacagcaggcgctagagctaaaacgccagttccagcaggatgccgtctatttcgctggtggcagcaaactaaacgccacacccactaaaacacggcaaaagatcgccatcgcgctatcgcaactggggctggatcaggtgagctggcagcagggggcattgcatatcggtgccaccattagcttacaacgtttaatggatacccagcttatcccgcaggctctgcgtgaggggctggggtttgtctattcccgccatattcgcaatcaggccacgctgggtggtgaagtcgtttcggcggcgaaagactcggtgctgttgccggtgctgctggcattgagtgcccaggtggtggtgggcagcggcaagacgatggcgctggaagactatccgctgtgcggcggtagtgaattactgctggcggtggtgctgccggatccttaccgtacctgcgctacccgtaaaattgcccgttcagccgcggggttgccggtggtgactgcggcggtatcccgcgatgcgcaggcgaaaattcgtatcgccctgagcggtgtggtggcacctggccgcctgcgtgatgcagagaacagtggcctgagtggcccggagctggaacaggcagtggcgcagatgatatctccgccagatgacatctgtggcagccgcgcctataagcgctatatcaccggtgtggtggtggcagacctgttggcggattgccaggcatcaggggagaaagcatgatgaatattcgctttacgcttaacgatatcccgcaggagatgcagtgccaacccggcgaaaacgtccagcaactgctgttcaagttgggcatgcattcggtccgcaatagcgatgacggcttcgggtttgccggttcggacgcgatcctgtttaacggcgtggtggtcaatgcctcgttgctgatcgccgcccagttggatgatggcgtggtgaccacggccgaagcgctggggagttggaaccagctcagcctggtgcagcaggcgatggttgacgtggggatagtccagtctggttataacgacgcggcggcagcgctgatcctgacggacctgttggcccgcatcgaggagccaacacgcgcgcagatcgacgatgcgctgtcgggcttgttcagtcgtgacgccggttatcagcagttctatcaggtcgtggctctggcggtgattcgccgtaacgatcccgaattccagtcgctcgccgctcctgagtttcgcagcgatctgaacgtggtcggtaagctgtgccctaaggtggacgcggcgaaaatggtacaggccaagccttgctatgtggaagaccgcgtagcccgcaatgcctgcatcatcaagatgctgcgtagcccgcatcctcatgccttgatcacgcatctggacgtcagcaaggctgaggtgttgccaggggtggttcatgtgatcacctatcgcaattgcccggatatttattacacccccggtgggcaaagcgcgccagaaccttcgccgctggatcgccggatgtttggccaaaaactgcggcacgtaggtgaccgggtggcggcggtcgtggccgagagcgaagagattgcgttggctgcgctggcgttgatcgacgtcgaataccaggtgcttaaaccggtgatgtcaattgatgaggcgatggcggaaggagcaccgctggtacacgacgagccgattgtctacgttcacggtgcaccggatgacttggccgagcagaaccagggtagcgcacagcgtggtaccgaacatgtgacgatcaacttcccgattggtgccaagccccacagtaatattgccgccgcggtacatgggcgcattggcaacgtggatcaaggctttgccgaggcggacgtggtgctggagcgcacctacgaatccaaacaggtgcagcagtgcccggcggaaatgcacgtctgctacacctacatggatggcgatcggttggtgatccatgcgtcaacccaggtgccttggcacctgcgccgccaggttgccaggatcgtcgggctcaaacagcataaggtgcacgtgatcaaagagcgggtcggcggcggctttggttccaagcaggacatcctgttggaagaggtatgtgcctgggctacctgcgtgaccggccgtgcggtttatttccactatacccgcgaagaagagttcatcagcaatacctcgcgccacgtggccaaggtgcgggtgaagattggggcgaaaaaagacggccgcctgacggcgatcgacatgaacttcctggccaataccggcccttatggcaaccatgcgctgacggtgcccagcaatggcccggcgctgtcgttgccgctctatccctgcgataacgtcaatttccaggtgactacctattacagcaacatctgtccgaatggggcttatcagggttatggcgcgccaaaaggcaacttcgcactgactatggtcttggcggagatggcggaaaaactgcagatggatccgctggatatcattgagcgtaaccgggtagttgaagggcaagagttgaaaatcctcggggcaattggtgaaggcaaaatgccgacttcggtgccaagtgccgccagctgtgcgctggagccgattttgcgtaaagggcgtgagctgatccagtggagttcaccgaaagtgggtcagggagactggcggattggccgtggcgtggccattatcatgcaaaaatccggtattccggatatcgatcaggccaactgcatgatcaagttggagtcggacgggacctttatcgtgcattccggcggggcggacatcggtaccgggctggatacggtggtgggcaaactggcggcggaggtgctgtgctgcccattctccgaggtgcatgtgatttccggtgataccgatcatgccctgtttgataaaggggcctacgcctcttccggcacctgcttctccggcaatgcggcgaagaatgcggcggaaaatctcaggaagaaaatcctgttccacggcgcgcagatgctgggtgagccagaaagcgacgtgacgctggtggttccaggcgtggtgcgcggtaaacagggcgaagtgacgttcgcgcagattgcccataaggcagagacgggaaccggctttggcaccctggtggccaccgccagctatatttcttctgactttgccttcccgtttggtgccaactttgccgaagtggcggtcaacgtgcgcagcggggagatccggttggataagttctatgccttgctcgattgtggcaccccggttaacccggaactggcgctggggcaaatctacggggcttcaatgcgcgccatcggccacagcatgacggaagagattatctatgatagccaaggctcgccgatcacccgagatctgcaaagctatggcgcgccgaagattggcgatatcccgctggacttccaggcgttcctggtgcccagcgacgatcgggtggggccgtatggagccaagtcgatctccgagattggcgtcaacggggcggctccggccatcgccatggcgatccacgatgcctgtggcgtttggctgcgcgaatggcatttcaccccagagaagatcttgagggggttaaataagctgtcagcgtagactctgtaataagtcgtaccgggatagtgaccaattacggtcattatcccgctatacctgccgagttaaaccggcggcgggtataaacgattcaatatattagccaaaggctaatctgttattgccgccatatatgagctaatcgctcaggctagcccgtggatttaacatggcgaaagtgcagggcgtggagcttattgaatcagatgatcaaatttactggaatggagtaaagagatgtctgatatgcctagttcaaataacgaccttatttatcgggtggaagataaaccaccctttgaccaatgcatcgtgggggcgattacccatttactggctatttttgtgccgatggtggccccggcgttaattgtcggcaccgcgctggggttgccgccggacgtcacagcctatctggtttcgatggcgatgattgcttcagggattggcacctggttgcaggtgaatcgctatggccgcgtaggctccggcttattgtccattcaatcggtcaatttttcctttgtgacggtgatgatcgccttgggcagcaccatgaaagccgatggcatgcatgtggaagcgatcatgtccactctgctgggcatctcttttgttggggcattcctggtggtgggctcctcgtttattctgccctatctgaaacgggtgatcacacccaccgtgagcggcattgtggtgctgatgattggcctgagcctgatcaaggtgggcattatcgattttggtggcggttattcagcgaaaagcagcggcacctttggcaactacgaaaatatcggtatcggcctgttggtgctgttggtggtgatcgggtttaactgttgccagaacgcattattgcgcatggggggcatcgccatcggcttgattgtcggttatgtcgtggctttgtgcctgggcatggtggatttctcggtaatgcaaaacctgccggtaatgaccgttcccgttccctttaaatacggattctctttcgatctgcatgccttcctggtggctggcatcatctatctgctcagcgtgttggaggcggtcggcagtatcaccgctaccgcaatagtgtccgagcagcccatcaaaggggatgaatatacagcacgtctgagcggtggtgtgctggccgatgggctggtctcggtgatagccgccatgctgggctcgttgccactgacgacattttcccagaataacggcgtgatccagatgaccggtgtcgcctcgcgtcatatcggcaaatatatcgccgtgatcctggtagtgctggggctgttccccgtcattggccgcttctttaccactatcccggcgccagtgctgggcggggcgatgacgctcatgttctcgatgatcgccatcgccgggatacgcatcattatctccgacggcttaaaccgccgcgaaaccattatcgttgcgacttcgctgggtctgggtcttggcgtctcttacgatccggaagtgtttcgtattttgcccgagtcgatttatgtgctggtggaaaacccgatctgcgccggtgggctcactgccattttcctcaatttactgataccgcagaacaagagtgagaaacctggggtcagtgaggctgaatttgaggtggttccggcggaaaaaaacaccgattgaccgggcgctgcacacgacgcccttctagcaatagccgttttatggtgataaggaatttgagtatggagcgtgagcaatcaatcaaggccgtgcggggcagttttctcgatatcacccgcaccgtacagcatccggaagaaatcgagggccatttgcgctttattaaagacgggctactgatcgttcgtgatggccgggtggagtggtttggcgactgggaagaggggcaccaccagatccccgatagcatccgggtgcgcgactacagcggtaaaatgatcgtgccagggtttatcgacacccatattcattatccacaatgtgaaatggtgggagcctatggcgaacaactgctggactggctgaacaagcacaccttcccggcggagaaacgctataacgatctggaatacgcccgcgagatgtcggcgtttttcatcaagcaactgctgcgcaatggcactaccaccgcgctggtgttcggcaccgtacatcccgaatcggtagaggcgctgtttgagtcggcgcgccatatcaatatgcggatgatcgccggcaaggtgatgatggatcgtaacgcgcccgattacctgctggataccgcagaaagcagctatagccaaaccaaggcgctgattgagcgctggcataacaatggccgcctgttgtacgccatcaccccgcgttttgcgccaacttcctcaccggagcagttggagatggtgcaacgcctgcgccaggagtacccggatgtttatctgcatacccacctgtcggaaaacaaggatgaagtggcttgggtgaaagccctgtatccagagcgcacaagttatctcgatgtttaccatcactacggcatgaccggcagaaaaagcgtatttgcccactgcgtgcatctggaagacgccgagtgggattgtctgcaccagacccaatcatccatcgccttttgcccgacctccaacctgtatctcggcagcggcctgtttaatttgcccaacgcctggcggaaaaaggtgcgggtgggaatgggcaccgacatcggcgcgggcaccaccttcaacatgctgcaaacgctgaatgaggcttacaaaatcatgcagctgcaaggttaccggctctcggcgtatgaggcgttctacttggcgacgctgggtggggccgatgctctggggctggcggacaccattggtaacttcaacctggggaaagaggcggactttgtggtgctggagccgacggccacgccgttgcaacagctgcgctacgacaactcaaaaaccttgatggataagctgtttgtcatgatgacactaggggatgaccggtcgatctatcgcacctatgtcgatggccggctggtgtatgaacgtacttaaccaaccgcactgcaatttgccaggattggcgttaccccaagcgagtgccgttgcggccagacgataatgccgtaacggcaagccaacggggtaggtgagtgtaaaccttcagagggcattgatatgtctaataatttatcgcaggcgacgtcagaaaaagcggccagctcgctagacagctattttaagattagcgaacggggcagcagcgtacggcaggaagtgttggcagggttgaccacctttttggcgatgggctatntattcggtgatcgtggtgcctggcatgttgggcaaggcgggtttccctccggctgcggtgtttgtcgccacctgtctggttgccggtgtggggtcgctggtgatgggcctgtgggctaacttacctatggctattggctgcgccatctcattgacggcgtttaccgctttcagcctggtgcttggccagcacatcagcatacccgtcgccctgggggccatcttcctgatggggctgatattcaccgccatttcggtgaccggggtgcgttcatggatcctgcgtaccctgccgatgggcatagcgcacggtaccgggattggtatcgggctgttcctgctgctgatcgctgccaacggcgtcggcatggtgatcaagaacccgctggacggtttgccggtggcgctggggtcgtttgtgtctttcccggtgatgatgtcattgctcggcctggcgatgatcctcgggctggagaaactgcgcgtgccgggtgggattttattggtgatcattggtatttccctgatcggcctgatctttgatccgaacgtaagatatcaggggctgtttgcgctgccgagcctgtccgggccagatggtagctcgctgatttttagcctggatatcaaaggggcattgaacccggcgatactgcccagcgtattggcgctggtcatgacagcggtgtttgatgctaccggcaccatccgggcggtagccgggcaggctaacctgttggacgaggatgggcagattatcaacggtggccgggcattaactgccgactccatgagcagcatgttttctgcgctggttggggcctcaccggctgcggtgtatatcgagtccgctgcgggaacggctgctggcggtaaaacgggcatgacggcggcggtcgtggggatactgttcttgctgatcctgttcttgtcaccgctgtcttatctggttcccggctatgcgacggcaccggcgctgatgtatgtggggctgctgatgctgagcaacgtggccaagttggactttgacgactttgtcgatgctatgtccggcctggtgtgcgcggtatttatcgtgctgacctgtaacattgtcaccggcattatgctgggcttcagcacgctggtgattggccgcgtgttctctaacgagtggcgcaaactgaatattggcacggtgattatcgcgctggcgctggtggcattctatgccggtggctgggcgatttgatggaaaactcagggttagtcgtttactgaccaatcaacactcgattcttcatgtaggggcgctgcatgccgcgcccattcacagttcaatacatcaactcatatgaacgtcctgaaggattacagatcagaacaacgctgataggtaataatctaggccttatttttagttaaatcaatggattgagttgtttttatttgagtggcttaccgcttcctctgatgatcctgaatcatatcgtagataaactatatgctgcaggtggggagtacgaccaaaccggagagactgatccgtgaattggctaggcgcgcgccgctgcatgaggaggaactgatgactattgccgaatatctcgaacaaaaagggcgagaggaaggacttcaggaaggactaaaacaaggtaaacgcgaagcgtttatggaaatagcccgttccatgctggctaagggtttagatcgcaccatggtcatacagttgacctgtctttcagaagaagagttggcgcaaatccgtcactagcgtttccccgcgtttctcaacgcggtatctcttcatccaactgctgcgccttttccaccgccttgacgatcgaggtatagccggtgcagcggcataaattcccggccagcccgcggcggatctcctgctcggtaaggcggtggccgcgaaaacgctccaccatcgaggtgctggtcatcaccaaccccggggtacaaaaaccgcactgtaccgcccccacattcacataagcctgctgtacggcagacagtttgccctgtttcacctcgccctcggtggtgcggatggttttgccatcggcccagagtgccaggtaaatacaggtatcggtagcgacatcgtcgatcaatacggtacaggctccacactcgcccacgctgcacccttgtttgacgctgttaagcccttgctggcgcagtaactccatcagcgacaggcggggatcgacctcgaattgataggggcggccattgatggtgcaattgatcagcatgataactctcctcctgcgcgttgggccgcctgggccagcacgcgctctgccagcgtacggatgatttgcatacggaactctttgctggcgcgccaggatgaacgtggcagcacgtcacgtatgaccgcctcgcgcacggcggcgagcgtttgcgcattgaatggctgacccagtgctgcggcctcggcatggggggcgcggatcggcgttggggccgctacgccaaaggcgattttcaccgcgctaaagtggccgtcttcgattttgcaggccgcagcgcaaccgatggtggcaatatccatcgcaccacgcatggcgtatttgtaatagctggcaccaaagtgctgatagtgctgtggcctgaacagcaacgccacggctatctcattttgccccaaagcgactttgcctgggccggtgtggaaaccttggatcggcgtgcggcgcagccctgcgggggtagcgatttccagttcggcttccatcaccacacagggtgaggcggaatcggcactggtggcaccgttgcagatattcccacccagcgtggccatattccgcacctgcggtccggcgatcgtcgcggctgcctctgccaggatcgggatatggcgttgcaccaacggtgaatcgataatctggctaaaggtggtgccgctgccgatgcgcagtgtgccatccggcagcaactcgataccgttcagctcgttcaggccgtgaatatccaccagatggcgatatttgccgttcatatgatggagctggattaacacgtcggtaccgccagcaatcagcctggcctgaggatcggcggctaattgccgtacggcatcgtctatgctggtcgcccgataatagtttgcaatatcgtacatggttttctccagttactcgatcaggcccgcctgcgaaaaatagcgatacagcgtttttggcgtcagcggtagttcatctattttcacgccggttgccatccagatggcgttacggatcgccggggcgggagagatcagcggcggttcacccagcgccttgtgcccataggcggattgcggctcataggtttcgacaaacgcacagtccaactctggcagatcgagaatggtagggaacttgtaatccagcagattgttattgcgcacgatgccgctttgctcgtcgatgatcatctcttcgaatagcgtccagccgatgcccattcccatgccgccatgcacttggccctcggccaacagcgggttaaggatctggccggagtcgtgcagattcatgatcttgttgatggtgaccttacacagctcaatatcgacggtgaggtcaacaaaggtgcagccaaaggcgggtggattgctgcgggttttgcaggaaacctcggccataatctgcccgccgacctcctgatcgtaatgggcgctcatggagacctcttgcaccgagcacaacactttttccggcatctccttcagcaccacctcgccgttgatcacatccagcgcccattcgggctggctgcacatataggctgcatgggtcaggatcttggcgcgtagctccgtagcggcctgacggatggcgggggcggcgacatagctttgccgcgaggcgaaggcaccggggtcgtaggcggtaatgtcggtgtcttgggtggagataacgtagatggaagaaaagggcacgccaatggtttgtgccgccatttgtgcaaacacggtatccgatccctggccaatttccgtcgcgccgacttgcagatggacggtgccatcctggttcagtaacaaccgggcgctggcaatctcgacgccaactggataggtattagacgcatagctaaggcaggccacgccaacgccgcggcggatggggccactctgattcaggcaggcggctcgacgggcatcccaatcaaacagttcccggcctttttgcaggcactcgataatcccggcgctcttgatctctttatgattgagtgggttgagatctccttggcgggcgacgtttttgagccgcagttccagcggatccatccccagttgggcggcggcttcgtcaatcatgcattccagggcaaaggttacctgcggtgcgccgtagccgcgcatggccccggcgttcggcaggttggagtaaaaggtggtggctttgtagccgaaggcgatacgcggatacaaataggcgattttattggccccggctgaggcaatggaatggccgtgagaagcatatcctccggtattggagagcacatccaggctataggtttgcaggatgccgtcgcggttaatgcccatcttaccgctgatggcgaacgagtgccgggtgcgtgatgccaaaaaacactcttcgcggctcagttcaaccttgaccggcacgccgccgagtttccaggtcaggaatgcggccatcggctcttctagtacgtcctgcttattgccgaacccaccgccgatatagggcttgatgaccctgatggatgaccatggccgatccagcgcctggcctaccacacggcgtactagatggggaatttgggtgctggagacaatcacgatacgatccatctcatccatataagcgtaggagatcaccccttccagatgacaatgttgcactacctgcgtgctgtagttaccttcgatcactacctctgacgcagccagtgccgcgtcgggatcgccgccgctgagctggtgttgtttcagcagattgcttttaccgccgtgtaacaacggcgcttcggctgccagcgcggtttttgcggtggtcatcaccggcagttcctgatattccacttcgaccagcatggcggctttctctgccgttaacgcgtcgcaggcgaccacgatcgccacgccatcgccgtgatggcgtacatgctgggtcagcagctgtttatccgctacgtcacgcttattggcatccaatgaccaggcatggcccgccgtcggaaaaccgtgctgcggcacatcctgataagtaaatatggcctcaacccccggcagttgcagggctttgctggtgtcgatactcataaccagaccatgggcaattgggctacggacatatttggcatgacgcataccggacagggtcatatcgtcggtatagcgcgcccggccggtgactttggcttgtgcatcgacgcgttcgggcgaggttcctacaggcatcttgctctcctcagtgagagaaaaagtcgcgatagccaacagcagcaacttacaggccataatggggtgaaaaatcagccggatgtgagatttgtgagttgaatctggtttatggcgtgggcgtgatagtttttggtggtcaacgaggggggggcgcaccaatgtcggcatagcaaaaaggatgtgagacgataatttatcatattgataaggataagattatcaggttgatacacacctgactcgggccgcggcagggttgagagtgagcagagcaactgtcggagaagaacggtccgttgtcgaaaacattatttttaaggttaaatgaataaataacaggcccacataatatccgtcgggtgctttaatttattttcaaggtaaaacgctttctccagagttgagtagtaaacctgaaagttaagtaaatcatagggatgtgttgtgtataagtgagtttatatttatacaggttacttggttggctaataaacaatgtgttgcatgtaaaattgcgctgggttaataatgattttgaacgaggttgctttatattacttaacaaaggagctgtttatgatagaactagataaatctatacttagtcaaatttccggcggtcgcggtaataatggtggtgaccggagtgataacggaggccgcaataacaataagggccgggggccgtccactaactatggcgggcaggccaatggttttgtcggcaattcatctcctggtatggatgcagcttgtgccacaggtcttgcactgggtgttataggtggtgcggctggtggcgcatggggtggcattggaactgctgctgccggggcgtttggcggcgcaattacaggcgttggcaactgtatcaacaccggcaatggcaatggcggtgggaaaggtaataatagcaattgtggtgggaattcaggtaacagctgtagttggtaatgtgacttatggctaaaaaccaataccggcatgttacataccgcatcacctaaaccgaggattatacaatgatgataaaatcaacttttttatttagcatatggatttttgttcttatgcttttcattattaaccctctgttttattgcgttggcattttagctgtttctgttatcgaactcccttcatggcttactaaggcaatccttattttcgtcatacctttaggctgctaccgtttggtcgatctggtttacaacgcggtgcgtaagatagtggccagaatgtcgaaagaaaaatgattgccagcctaatcaaggcaaaatattggccccataacggttaatcagtttggggccaatcttgccgtggctttgatggttaaatcgcagtcataccgcaccttgcgttgtatgccagtacggtagcgagtcgctaccgtcgcacacctccaccgtcagcattaattctccgcgccgcagttgaatacgcagaccaccgttatcccggccgactgcaacccgccccaaaccacctatagcttcacaatctgcaccagattggtgtgttgagggttgcccttggccagcggggaagggcgatggtgggtcagaatattcacgctgccgccgtgatcgaccttatcgccaaacatatctgccgccagccaggcaccttggcccatagcggtgacgccaggcataatgcgtggcgttaccttcgcctggatctgcgtttctccccggccattaaagaccttcactcgatcgccgttcttgatgccgcgcgcctgcgcatccagcgtgttgatccacacctcctgcgggcaagcctgctgcaacacgtcaatgttgccgtaactggagtgggttctggccttgtagtggtaaccaaacagctgcagcggatattggctgctcagcggatcttcccaaccttcgaaccctgcggcatagacaggtaacgggtggatcacatcttctggtgccaactcccaggtggctgcgatctccgccagccgttcggagtatatttcaatcttgcctgagggtgttttcagcgggttggcctgcggatcttctctgaactccttgaaggctaccacgtgctcttctgggcatttgcgtttataaatgccagcgcttttcatctcttgatagcttggcatttccgggttgcgttcgcgggttttctcgcacaggtattcgatccactgctgctggttgcgcccctcggtgaaagtcgcttcggcctgtggcccaacccgtttggccacctcggaaaggatctcgtaaatcgggcggcgttcaaacttgcgcgtggtggcgggctggcccaggatcacgtagcccatattgcccgcggattcatgagagatcaggtcttcctgctcggttggcatcaggtcgggcagcagaatgtcgcaatatttggccgatgaggtcataaagtgctcgatgccgacgatcatttcacacttgctgtcgtcttgcaggatctggtgggtacggctgatatcaccatgctgattgatcagcgtattactggcatagcaccagataaatttgatcggcacgtccagcttatctttgccacggatgccgtcacgcttggcggtcatttccgggccgcgcatgatggcgtcggtccaggtaaacaccgaaatcttggcctgtaccgggttggtcagcatatcgaaccattccacgcccagatcgaagctgccttcgcggcagccggtattaccgccgttgataccgacgttaccggtcaggatcggtaacatggcaatggccctggcggtttgttcaccgttggcgtgacgctgtggcccccagccctggcagatataggccggtttggtcatgccgatttcgcgggccagttggataatggtgttggccggtatcccggtaatacgagccgcccactctggcgttttggcagtaccatcgtcaccctggccgaggatataggctttgtaatggccgttttttggcgcgctgctgggcagggtggtttcatcataacctatgcagtatttatccaggaacggctggtccaccagattttcgctgatcaacacatgggctatgcctgcaaccaacgccgcatcggtgcccgggcgaatcggcacccactgatcttcacggccaccggcggtatcggtatagcgcggatcgatgacaatcatcttggcgttagagattgccctggcttgctccagataataggttactccgccaccgctcatgcgggtttccgccgggttattgccaaacagcaccaccagcttgctgttggcgatatcatccgggctgttgccctgctgtgcgccgtacaggtagggcatggcggcggtgatctgcgcggtgctgtagctgccatagcggctgaggaagccaccgcaggagttcatcaggcgataaggcacgttggagttggtgatattgccgccgtcgaccccggtaccgtacagcacgtgcaccgcctcattaccgtattccgccagagtgtgcttcaactggccgctgatggtatccagcgcctcttcccaactgatgcgtttgaatttgccttcgccgcgtttgccgacgcgtttcatcgggtacttcagccggtccgggtggttcatgcggcggcggatagagcgcccacgcaggcaggcccgcacctggtggttgccatagtgatcgtcgccggtgttgtcggtttccacccagtatacttcgtcatcccgcacgtgcaggcgcagtgcacagcggctaccgcagtttacggtgcaagaactccagaccaccttgtcttgcggctgttggggatttggcaacggctcggcggcggcgattttacggaagggcaacaccagccctgaggtggcggccagtaagcagccggtagccgagccggttttgattagcttacggcggctgaacgggtgatgaagcaggtcggggatgttgttatcgttcatgatagtgctccctgtgctggcctatttctttgccgataacgcctgatgtctggtttgttattaacccatgatgtctcttggcaagacgttttaagccaggcaaccgtggtgtgatctattaaaagtgctaacctgtagcgagtaaagtcgtctgcattaatgaatttgcattgataatattcgccatgcaaattcatctatcagcttgataattagattacctcttaataagtatacccacgcgcgggcttgttgaagtttgcttgaggtcaagttttcgctttgcgcaagcgaataaagcaggatggttgccttttttctatagcagcaattgttgtgttcaggccggagtcttaatctgtagcatatttggttggtggaattaggggatgttggtgaattatatccagcggcggtacaatattgttatggtctcgtgcaacataagccccccattgcgcgcttggtagagggattagcaaagtcatttattgctttattcccacgggttcgcataaagaccaacgcccgccaaccgtcactgatgcacgcaacatccgataaaatagcggcataatgcaatatcattgccatgcatgaccccgccgatgactctgcaataaaattttaaactaaaacggcatattacgtgttttcctgccccggccttttctatactcatcacgcttgattgtgtcgtaaagcttatgctgaagccggggagatattaattgttacaaaactatgcaagagaatacattattattcttgttgtttgattggtgggttatttaatggcgttaggatttttatttaaaagataatgagagttattgttatttaaatacgtgcgcgaataaatctagcgagataaatatgcaagaaaaatattttttgctgaagcgatttttctcatgttacgcaaatattaactgttacctcagcaaaggttgataaagatcaactcagggtagccggaaaataacaatatattaaccacccgcacactgtgtttacgggcttgtatgtcggtcatcaacaggggatagataataatgataagggaaaatcaaacatttttccgggatggcgtgaatcgccgcgattttatgaagttatgtgcggcactcgccgccaccatggggctcagcaccaaagccgccgccgaaatagcccactcggtaggttcgccacagcggccaccggtcatctggatcggggctcaggaatgtaccggctgtacggaatccttgttacgggccactcacccaacgatcgagaacctgttgcttgacgtggtttccatggaatatcacgaagtcctctctgctgcgttcggtgaacaggcggaagaaaacaagcaccgtgcgattgagcaatacaaaggcaaatacgtgctggtggtcgacggctccattccgatgaaggatggcggcgtctactgcatggtggcgggtaagccgatcgttgagcatatccgtaatgcggcagagcatgccgctgcggtgatcgccatcggctcctgtgctgcctggggcggcgtcgcggctagcggtcctaacccgaccggcgcggtcagcctgcaagatattttacccggcaaaaccgtgatcaacatccccggctgtccgcccaacccgcacaacttcctggcgacggtggcccatatcatcacctatcaacggccaccggcgctggatgctaaaaatcgccctgagttcgcctatgcccgtctgatccatgaaaactgcgagcgccgtccgcactttgacgccgggcgttttgccaaacagtttggtgatgaaggtcatcggcagggctggggcctgtatcaccttggttgcaaggggccagaaacttatggcaactgctcaacgctggagttctgcgacgtgggcggtggcatctggccggtcgggatcggtcatccctgctacggctgcaacgagcagggtatcggctttaccaaagggatcgcccagttggccagcgtcgaaaatcctaccccccgcaacgccaaacccgaggtgggtagcgttgaaggcgggcatgtcagcccaacggcgatgggattgcttggcggtgtcgtcggcctggttgccggtgtcagcctgatggcggtgaaagagctggggcggcagcaaaaaacgcagcgtaaagacgacgagcagccgccaagcaaggagtaagccgtgaatcgacgtaactttctaaaactgacctgcggtggcgcaatgttggcaggggttgcccctgcggcgcaggccgggccggagaacaagccgcccatccccaactcgctgggcatgctgtatgactcgaccctgtgtgtaggttgccaggcttgtgtcagcaaatgccaacgtatcaaccataccgatgaaccgcatggcgaaacctatgcctacgcgggtaccgaagcgacctggtcgaacaacgacaagctcagcccttacaccaacaacattattcaggtgtggaccagcggagacggcaagcacaaagaccaggtggacaacggctatgcctatatcaaaaaacagtgcatgcactgtgtcgaccccaactgcgtttctgtctgtccggttcaggcgctgcacaaagatgccaaaaccggcatcgtgcattacaacccggatgtttgcaccggctgccgctactgcatggtgggctgcccgttcaacgtgccgaaatacgactacgacaacccgttcggcaagatccacaaatgcgaactctgtaaccagaaaggcgttgcccggctggatcagggcgggctgccaggctgtgtcgaggtgtgcccaaccggggcggtgatctttggcacccgcgagcagttaatggccgaagccaagcagcgtctggccagtaagcccggtgagaattaccgttacccgcgccaaaccctacaaggcaacgaccattacgaacacccggtgccgcattaccaaccacacctgtatggcgagcacgagggcggcggaacgcaggtgctggtgctgaccggcgtgcctttcgaggatctcggcttgccagcgctggaggaactgtcaaccggtgcacgttccgagcatatccagcacacgctgtacaaaggcatggtgttgccgtttgccgctctggccgggatcactttcctggtgcagcgcaaccagcgtaacgagcgtcaggacaagaaggaagataaacatgacgacgcataaaacgcagccactcggcgggcggctggtgagctggccggtgatgatgctggcaccgtttgtggtgctgtgcctgttgctgatcctcaaacgtctggtgttggggttgggcgatgtttccgatctgaacggcggctacccatggggtatctggatcgcattcgatctgctggtgggcaccggtttggcctgcggcggctgggcgttggcctgggcggtgtatgtgttcaaccggggggaatatcacccgctggtgcggcctgcgctgttggccagcctgttcggctattcgctgggcgggctgtcgatcaccatcgacgtcggccgttactggaacctgccttatttctatattcccggccatttcaatacctcgtcggtgctgtttgaaaccgcggtctgtatgacgatctacgtgggcatcgtggcgctggagttcgccccggcgctgctggaacggctgggctggaaggtgtcgctcaaacggctcaacaaggtgatgttcctggtgatcgccctgggcgcattgctgccaaccatgcaccaatcctcgatgggttcgctgatgattgcggcggggatcaaaatccacccgctgtggcaaagctacgaaatgctaccgctgttctcgctgttgacggcaggcattctgggcttctcgatagtgatatttgaaggctcgctggtgcaggccgggctgcgggggaaagggcccgaggaaacgccgctgtttgcccgcatgacctacatcatcgatgggttcttactgctgtttattgtgctgcgctttggggagctgatctggcgcggtaaaacggcctatctgtggcatctcgatcggtttgccatctcgttctgggtggaaacgctgttgatgttggtgccgctggtgatgttccgctggaaacgtaaccgccgcaactcacgcctgctgtttctcggcgcgctgagcatggtctgcggggcctcattctggcggctgaattacgcgttgctggcctacgaccctggcaatggctaccactatttcccgacggccagcgaactgctgatctccatcggctttgtggcaattgaagtttgtgcgtacatcctgttgatccggttgttaccggtgctgcctgcgcatcaacataagaatgaaaacaaccagttagaggtagagcatgagccaacgcatcaccattgatcccgtcacccgtattgagggccacctgcgcatcgactgtgaaatcgaagacggcaaggtggttaaagcctggtcctccggcaccatgtggcgcggaatggaagagatcctgcaaggtaacgacccgcgcgacgcgtggatgatcgtccagcggatttgcggcgtgtgcaccaccattcacgcgttagcctccgtgcggacggtggaaaatgcgctggggatggagatcccggtcaatgcccagtacatccgcaatatcattgccgccgcccacagcattcacgaccatatcgtgcatttctatcagctctcggcgctggactgggtggacgtcacctcggcgctgaaggccgatccgcagaaggctgccgatttgctcagtggcctgtctagctggccgttgaacagcgctgccgagttcacccgagtgcaacagaagattaaagatctggtcgccagcggccaactgggcatcttcgccaatggctactgggggcacccggctatggcgttaccgccggagattaacctgatcgccgtcgcccactatttgcaggcgctggaatgccagcgtgatgccaaccgcgtagtggcaatactgggcggtaaaacgccgcatatccagaacctggcggtgggcggggtggctaacccgatcaaccttgatgcgcctagcgtgctgaaccttgagcgcctgatgtacctgaaaacctttatcgatcgcctgggcgactttatcgagcaggtttacctggtggacagcgcggtgatcgcggcgcattaccctgagtggcttaccctcggcaagggctcggactgctatctctgcgtgccggaactgccgatcgatcgtaaaggcgaccagttcctgatgccggggggctatctggagaacggcaagttccgaccgattgccaaccagcgcgatgagtatctgatcaagggtattcaggagagcggcaagcacgcctggtatcaggacgatgaaccgctggcaccgtgggaagggctgacgaggcctaaatacaccggctggcaggaagatggcaaatactcctgggttaaagcgccaaccttctacggcaaagcggtagagatggggccgttggcctggctgatgtgtaccctgcaagccgagcacccgccaacccagaaatattttgccaaggtcaacagcaattaccaggccctgaccggcaaagcgttaaccgccgatcagttgccgtcgaccctgggccgcattgtcgggcgcacggtacatgcctgcgtgctgcatgaaaccctgggccagcagtggcaggcgttggtgagcaacattggcagcggcgaccacgaaacctttatcccaccgaatataccgttgaccggtgagatccggggcgtgggctttatcgaagccccgcgcggcgcgttgtcgcactgggtggtcatcaaggacggcaagatcgccaactatcaggcggtagtgccctcaacctggaacgccgggccacgcaactttaacgatgagcccggtccttacgagcgctcgctggttggcacgccggtggccgatccgagcaaaccgctggaggtggtgcgaactatccactcgttcgacccgtgcatgtcctgtgcggtacatattgtagacaccactggcaatgaagtgaccagggtcaaggtgctgtaatgagaatcttggtattaggcataggtaatctgttgttgggcgatgaagcggtgggcgtgcgcatcgtcgaagcccttgagcagcgctatcgcttaccggcccatgttgaggtgctggacggcggcacctcggggatggaactgatggaaatgatggccgatcgcgatcatctgattgtggcggacgcggtgttgaccggtgctgctccgggcagcgtcgccgtgctgtatgacgaagagatcccggcgctgtttacccgtaaggtttcgccccatcaactggggctttccgacgtgctgatggcgctgcggctgacggatgagtttccccgtcggctcaccctggtgggcgtggtgccagagtcgctggagcccggaattggactgagcgccgtggtcagccaggcgattgagccagcgttggcccaggtgttgctggcgctgcaagagagcggcgtggtggcggagccaaaagaggtggccaatgcagactgtgactaacggttttcagctcaaccccagcgcgctgttggaaaccgcctttcaggcgattgccgacggtgagatgcaggatttgccgtttttccaaccgcaaatcccggtgcgtgcctgtggctttcagctgtttgaacggcagtgggtcggcaccattctcacgccgtggatgcttagcctgctggtgttgcccggtcctgaacaggtttggcagcctcatgcggtgggagacaagttggcgttaagcctgccttgcggcagcgtgcggttcatcgtcggtgagattgcgggttgcgggcaatacctggcctgttcactgatgtctccgttggatcgccatctgggggccgagcaggcgctggcgttggcacaacagagcgcgcggatggcgctttcgctaccggtggcggatggcaacatccccagtaatccggggcgcagggcgctatttggcctgtcacagagaacggcatagatgcatgaaatcagcctgtgcctgagcacgatggaattgattgaacagcaggctcggcagcacggagcaaagcgggtgacggcggtgtggctggaaattggggcgctctcctgtattgaagagcacgcgctgcgtttcagcttcgcctcggcatcccgccatacgctggcagaggggtgccagttattgctggactaccagccggcccgcgcctggtgctggagttgcagcatgagcgtgcagattgaaaaacatgatgaaggttgcccacagtgtggtagccaccagctgcgcgtcgagagcggtgacagcctgcggttaaagcagctggaagtggaataattttgaggagtgaataacgatgtgtacgacttgcggttgcgccagtggcgaaaaaaccatcgaaggtgacgagcatcatcaccacgacgaccaccatcatcacgaccatcatgatgctcaccaccatcatcctgatcatcatcacgacggggaacatcaagcaccggcaggcgtagtgatccatcaccaccatcactatcaccatcaaggcgatgtacatcaccattacgcgggtgtcgctgcggcggaacgttttacgccagaggtgcaaccgcattcgcaagacctacactatgggcacggcgaggcggggagccacgcaccgggtatcgggcagcgccgtctggtgcagattgaacaggacgtactgagcaagaataaccatctggcggcccacaaccgcgaacacttttccgcacaacatattctggtgctgaacctggtttccagcccaggttcgggcaaaactaccttgctaacggccacgctggaacgattggcgggcaaattaccctgcgcggtgattgagggcgatcagcaaaccagtaacgatgccgagcgtattcgcgccaccggcgtaccagccattcaggttaataccggcaagggctgtcatctggatgcgcagatggtacacgacgcggcacaccgcctggatttgcaggatcacagcctgctgtttatcgagaacgtcggcaacctggtctgcccggccagcttcgatctgggcgaacggcacaaggtcgcggtgctgtcggtgacggaaggggaagacaagccgttgaaatacccccatatgtttgccgccgctacgctgatgatcatcaacaagatcgatctgctgccctatgtaaacttctcggtggaaaactgcatcgcctttgcccgtcaggttaatccgtccatccaggtgatcgcgttgtcggccaccagcggtgagggtatggatctctggctgaactggctgggagaacaataatgtgcctcggtgtgcccggtaaggtgaccgcagtcggggaggatatccaccaactggcctgggccgacgtgtgcggcgtggcggtcaggatcaatattgcgctggtgtgtgaaggctcaccgcaggaactgatcggccagtgggtgttggtgcacgtcggctttgccatgagcctgctcgatgagcaggaagcgctggaaacgctggcagcattgcagcatatgcgtgccgtcgggctggcacgggatgacgaggatgccaatgcgctacgttgatgaattccgcgatccggcgttgtgccaagcgctgttacggcgcatcgaaacgctgatgcaagccattccccagtcgcagcgcctgccgttacaggtgatggaggtctgcggtggtcacacccacgctatcttcaagtttggtcttgaccaactgttgccggaaagcctggaatttgtccacggccccggctgcccggtttgcgtattaccgatggggcgcattgatagctgcctggagattgccgcccatccggaggtgattttctgcacctacggtgatgcgatgcgggttcctggtcgcaatgggtctttgctggatgctcgccgccgtggtgccgatatccgggtggtgtactcgccgctggatgcgttacagctggcggcggataacccccagcgcgaagtggtgttttttggcctgggctttgaaactaccatgcccgccagcgccttaacgttgcagcaagcccgccagcgtcagttgagcaatttcaccctgttttgccagcatatcaccctgatccccaccttacgcagcctgttgcagcagcccgatgtgcgcatcgacggcttcctggcaccgggccacgtcagcatggtgatcggcaacgcgccttatcagtttatcgctgcggattatcataagccgctggtggtgaccggctttgagccgttggacattctgcaaggtttggtgatgttgctggaacagctgcgtgatggccgctgcgcggtagaaaaccaataccggcgcatcgtgcccgaacagggcaatcttctggctcagcgggcgatggcagaagtgtttggcctgaaagagagcagcgaatggcgcggcttgggcgagattgcccactctggcgtgcagatcaaaccggagtatgcggattttgatgccgaactgcggtttaaaccgcaggcgcagcgggtagcggacgatccgcgttcgcgctgtggtgaagtgttgaccgggcgctgcaaaccggatgcctgcccgctgtttggcaaacaatgtactccggagaacgcctttggtgccttgatggtgtcctcagaaggggcctgttcggcttactatcagtatcgcagggagaccgcataatgcgtgaagtgaacaacgggcgggaaattaccctggcccatggcagcggtggccgcgccatgcaatccctgattgaagaactcatgctgcccgcctttgccaatccggcgttaaatgcccgggaagatcaggcacgaatttcactggatgatctcgccatctcgggcgaccgcttggcggtatcgaccgacagttacgttatcgatcctattttcttccccggtggtgatatcggcaaactggcggtttgcggcaccgctaacgacgtagccgtcagtggcgcccagccacgttatctgagctgcgccatgatcctggaggaagggttgccgtatgccacgctggaacgcatcgtccagtcgatggccagcacggcgcagcaggccgggatccagattgtgaccggcgatactaaagtggtaccccgcggtgcggcagacaaaatctttatcaataccaccgggttaggaaccatcccggctggcgtccactggggggccgctaacatccgcctgggtgacagcattatcgtcagcggcaccttgggcgatcacggcgcaaccattctgaatctgcgtgaagggctgggcctggagagtgaattaagcagcgattgcgcgctgttggctccgctgattgctccattgttaccgattgccggggtacgtgctttacgcgatgcgactcgcggcggcgtgacggcggtgctacatgagtttgccgccgctagcggctgtggcatggcgatttcagaggcggcgctgccgttgaaaccggcggtgcgggggatttgcgaactgctggggctggatgcgctcaactttgccaacgaaggcaagctggtgttggtggtggcccccgagtctgaggctgaagtgttggctgctctgcatcagcatccgctggggcgcgatgcggcggtgattggccataccaccgagcggcagcaggtgagcctcaccgggttgttcggggtttcccgtcggctggatctgccgttggatgagcctttaccacggatctgttagtgattcggttggcggaagcgtgtgggtattcctaaccctcccacagggagaggggaccgatcgagtttgcatttgtggcagaggatcacttgaccacagccgatggtgagggataacaggacccgctaacgacaccaaagcagctccctctccttagggagagggttggggtgagggaaatacagattgatcacgataactgaccgaggctccgaatcaccttcttcccttttaggaagcgcggaaaagatcgccagggcaacaggagagttaacacaacatggcagattttgagccggagaatatcgccagcagcaatggccttcgcctgcggatcaagggcaaggtacaaggggtcgggtttcgtccctatgtttggctgctggcgaggcgctttaacctgtgcggcgaggtcagtaatgacggagccggggtaatcgtccagctatggcaatcgccagccataacggattttttgcgggtattgccgcaagagtgtccacccctggcgcggatcgatagcgtcacctctacaccttttaactggccgcagcagccagcgagtttcaccattgccagcagcggcgcggggcaagtggatacccatatcgtggcggatgcggccacctgcgatgcctgcctggcagagctgaacatgccgcataatcggcgctatcactatccgtttatcaactgcacccactgcggcccacgatttaccatcatacgccggatgccctacgatcggcccaatacctcgatgcagccttttccgctgtgcccgcagtgcctggcggagtatcaggatcctgccgaccgtcgttttcatgcacaacctaccgcctgcccggagtgtggcccgcacctgtggctcagtgatgccacaggccaaaccaccgccagcgccgatgacgcactgcaactggccgcgcaggcgctgattgccgggcagatcgtagcagtgaaggggatcggcgggtttcatctggcctgtgacgctaccaaccctgctgcggtccagcgtctgcgagctcgcaaacatcgcccggccaagcctctggcggtgatgatgccggatacctactggctgcaacaatgtgttcaggtcgcggaaccgacggcactgttaaagctgttgcgtagcccaccagccccgatagtgctggtggcggctcacccacagagccccttgtgtggcgagattgcgccggggctcaatgagataggggtgatgttaccggccaatccgctgcaacatctgctgttgcaacaggttgcgcggccactggtgatgacctccggcaacccggcaggtaaaccaccagcgttgagcaaccagcaggcactggaagaactcgctggcgtggccgacgtttggctgctgcataaccgcgagatcgtccggggagccgatgactctttagtacgcttgaccgagcagggcagtgagatgctgcggcgggcacgtggctatgtcccggatgcgatgcctctcccccctggctttaccgcccaaccggccattctggcgctgggggccgacagcaagaacaccttttgcctgctgtggggtaaccaggcggtggtcagccagcatttaggctcgctgggggatgaggccacccggcaacaacagcagcaactgcttgctctatttggtgaaatttatggtgtggtgccgcaggcgatcgccatcgatgcccaccccggctatctcagccatcagcagggccaggcgttggccacagagctggcgatcccttgcatcaccacgttgcatcatcatgcccatctggttgcctgcctggcggaacatggttggccgcgcgacggcgctaaggtgattggtctggctttggatgggctgggatatggccttggcgggcaactgtggggcggagaatgtctgctggtggattatcagcattgtgagcatctgggtgggttgcccgcagtggcattgccgggcggtgatgttgccgcccgccagccatggcgcaacctgttggcccagttacagcgctttgtccccgattggcagacgttgccagaagccgcggcgatccctcaaccgcaggcgacgatcttgctgcgggcggttgaacggcaaatcaactcgccgctggcctcttcggccgggcgcttgtttgatgcggtggccgcagcattgcagatcgtgccgcaacaactttcctgggagggggaggccgcctgccagttggaagccttggcatggcaaagtccgcctcatcaaccgccggtttcgttgccgctgctcgataatcagctggatctggccaccttctggcggcaatggctggcctatcaggcccccccggcgcagcgcgcttatgcgtttcatgttgccttggcccaagggtttgccgcactggcccgtagagccatgcagcaatacggcatcaataccatcgtgctgtccggtggagtcatgcataacgttctgttgcggcaactcttgcttcagcagttggacggaacacaggtcttactgccatcccgcctaccggcaggagatggtgggttggccttgggacaggcgctgattgccgccaatcgacttatttcaggcaagcataaggatgaatttataacgtaatcaactgttttcacgagtaaaaacatcaccttcattcactggaaaatttaggtattcattatgcgtattaatgtcaaagctgtggctgtatccctactggcgctgttccccatgctggcctttgcccatgtgggccatgacggtggcgcgcatcacgtattaagctttaccgaaggctttatccacccgctgaccgggatggaccatctggtcgccatggttctggtgggtatctggagtgccatgaacaccaaacggtggtggctggctccgctggtgtttgccggtttattgctgaccggtgcgctggttggcatggcaggcgtgaccgtgccaggcactgagtttatcgttgccgcctcgctgctgggcatcggggtgatggttgccttacagctcaaactgtcggcgataacgggcgcgctgattattggcgcttttgccatcttccacggtctggcccacggtgcggagctttcccattcggtggcggcgctttccggtatggtgattgcaacggtgttgctgcacgtggctgggttgggtatcggctatctgctggcgtcttcgtctacgcatagcggctgggcgcgggtgattggcggcggttcatcgctgctggggatcggcctgctcagtggagtgatctgagtttatccaattactcaccatggtttgctggcagtgactttgcgatagctgccagcagtcaccctgtttatctcaaaaaataacaagcggctggatttgtgcctattttatagttagattccctgcacaccaagtgcgcttggtactgcgctatcttccgcacaacttttaactgcatgagttaattcaagagttacagggaacgttgctatgaacagggttataggtttactttcgttatgcctggtttctttttcttctctggccgattgccagcctctccttgccgatctggctaagccctttgccgccaaaaccaccatgaataccgagctatccacctgcaaggtgtggccctatgccccggataaaaccattgcggtgctgatgctggagcccaaggaggagacccaacctgattttaccgactatgacgtcgccgttttggtggtcgatagtcagtccggcaaggtgctggccagcaaatatcatcccagggcgattatggatgatgccatttctacccgcagcgtgaccattgacactgcacgctaccaattgtctccggcgatacgcgctttcggggtgcgctttgaccaccggggagcttcctcggtcaatcccatcagcatcgaacgccttaacctctataccctgcaagaacagcaattaactctggtactcaataatctcaccatgaatgaatatagcggtgagtgggatggccagtgtgtcggggatttcgccgcgaccaatcgcgcattggcgcttggcaagagcgcacataacggcttccaggatctgcagctacagaccatagcgacgcacaagggggcgagcagaaaaggggaggattgcgtggaaagcaacaaagtcgttgccaagacccgcgtcgagctcaagttcgatggtaaagcctatcccgtagagcaggataagctgctcgatcatcgtttttaatccgtgcctggtcgttagcaaccatgaaaaaaatctgcttctatgagctgtcttttatccgccacgatctcaacgcgcccagcgaaagtaagctacggcgcattttggccggggacaaggtgttctatacctacagcaaacagtttgttgatgccaaagtgttataccgtttggtaccgggagatcgcgtgtatatcggtgcccatcagttggctgatggtagctactggctgcattggctggtttcgcctgaaaagggggagctgcaaccgaagctggccgacattagcaaaccggctgcgttgatgaagctggtcggcgcgatcatggtgatgacgctctcagcggtgggttatttccagttgctgaatatctgggtgatggtgctactgctttttgttttcatctttggctgctggtggttcgtggcttcgttacatacgctgatggtgggaaccagccgtcatacgcgtaggttgttaaaagggctggagagcatcaaacaaggcgacacgtccctttgccttaccaccaccgaatcattaaccgagccggggggcggtgcgccttcactacaggccagcaaagaattggctaacgatctggatgcgctgcagccgaatgattggctattggccgataaagtcaccttgaccagcgtgagcggagaggctgccgatgttagcgcccgccgcgattttaccggcggaggcaaaagccgccgggattttatcgagtaccaatttagctgcaatggagagcggttctcatttcgtagcggaattaactcgctgatggaagacctcaatccgctgttctatcggcaacatccgttcttcctggcggccgaagatccgctgatgttggtggtcaatcagcaagataatgcggtgctgggcctgtgtaatgaaagggatggcagcgcctatctcaagctcggcgggattgccgtttcttttcaccagctcaagctgatgtataaagtgatgtttggctgctgctcttttttactggtgatgctggtgtttttcaccctgcatgattggtgggagcagggcggtgcgccggataagtgggactggctggacgccgcaggcatgttttatgactttgctctgatgagcatcatgattttctgcgtgttcatgctgttggtggaggtctgcacttggataacgcgcaggaactcgctcagtgcggcacgctttgtctttgcccgccaactgttggtgttgtttaaaaaacgcaacggtggcaaaccctatattcaggaagtcccctgatgttcagcaatagcctaacgcgcatcatcctgctggcattggggcttatcatttcctggatgctgttttatatcgacagctttgccgggtttgcccccgactggcagtggcagcgaaactatcaggcagaacgtcctgcggtagtcatgagtggggaacgcctgagcagttttcaacaaggggtgctgttaacgggtatcagcgatgtaataaatacgcggatcacggatattgagcgtgaccagaatacgctgatctctcactatgaaaattcggtgcagatcgatgtgctggcagacattggtccccctttgttaaacctgcagatatcccctgataccaccatgttacgcttgatgctggaggcaaaggttggccgtggaacaatccggcaccggagctatgatgacagtgccacgatcccggtcagccaactcatcatcgaagagaatggcaagctgcgcgtcagcgcccgttttttgggctacgtggctgagcaacagtgtgatgttcaggggcattgcctggtggtgttcggcacccgttcttatagcaaagatgccgtattttattctgccgatggcgggcgtaactggtgttggttaccccagtggcaagcacccggtggtaaccagacttatcagctcttgggactctctggagcgcagagcgtgctgctggttcaacaggataaactctaccggtcggacgatctcggccagcattggcaacagatattcgatctggccagattgttaacggaacgcgggatcgagcctgctctctatgcagccagttggcactataacggcggtgatcgggtgatcgtcagtaatcagccccataacaccggggaagaggatcggttaactgcttcattgctgcttgatttcaatctgaaatccgctcaaatccagtccagccagtgggtgggcggagatatcgttgcggccgacatcagcccgcaaggggattttgattttgtcttacgccagcggccacggtggctttataccctgaaccggttgcgggagaatggcgcgctgcaaccgctgctggaaaccggtaaaaaagccttgggcacgctttatgcgggtaatgatctgctgatgatggagaaagcgttcaacgacccgctgcatatgacagtctctaccgatggcggccagcactggttcagaatgaaaaaactgcctgatagctataactatcgcgtgcagtttgaccgctggcgtaaccgcctgttccgctttccagcccatgatttcgattaccctaagttgggcaatagcgacggcctggtgtatgagacaaccactccgccgtaattgccatgctgcatccgttccaataatcaaagggtaacgtttgatatctaaaaacgcctcagtcctccaccagcacctgttgcagcgcggcgatcagcttgcggttggccgactcgcttttgatagccacccggtaatagtcggcggaaaggccagggtagctggcacagtggcggatcaggatgcggtgctgcaacaacgcctgttgcagatcatagccggggcgcaggcagcgtaagaaaatatagttcgccgcccctggccagatgcgcaagtgcggcaaggctgtcagcgcgtcaaacaaccaagcacgctgctctgccaaccattggtgggtttgctggatgtaatcgagatcgtcgaggatcacttcgccggccagtgccgcataggcattgatggtccagggttcgcgcagttgcttcatctgctgcaggccagcgcgatcgctgctgaccagatagcctaggcgcagtccgggaatggcaaagaacttggtcagcgaacgcaggatataaaggcgggaatactctgccatttgcgggatcaggcccggtgtatccggcagaaaatcgataaaggcttcatcaacgatcaacgcaatattgtgctggcgacaacaggcgacaatggcctgtaacagcgtggggtcaggcatcagcccggtcggattgttgggggtggccaggaacaggcagtccggttggcgctcggccagcacctgcagcagccgctcatcgggttgaaaaccaccggcttcatccagcgggaaatcctcgatctggcagtcaatccgctgcaatgcccggcggtattcggcaaacccaggcgttaggagcagcgccgtgcgggggcgtagccggttcactatggcgtaaatcagctcggtggccccgttacctgccatgatattttccggcgggcagtgatggactcgcgccaatgccgcatgcaaacgccgatattcgacgtcgggatagcattcggcgctggtcagatgctcgataatcgccgccttcaggctggcgggcatgcccaatggattgatattggcgctgaaatcaatcatctcggccggatccaggccgtttttcaacgccatttccagtacgttaccaccatgttcactcacggttttgctattcccctgtcaagtttgcgtgcaggatagcacagggtaattgccgttgatccgttgcagactaaagctgtcgcctaggtaaatgccagatcttggcgtgtattcgccatatcaacaggttattatggcatggccattgtcgaggctatcgagatgaaaactaagtgataaattgaagcgttgagtgcattgaacccataacgttttattaaccatattattgccaactggatatcccacaccctgcacgatgacaggttgtggttgggaagggggtgtaactcccccgcagcccccgctgctgtgatgccgacgagtccactgcgccactgatctgaggattgggaagggagtggatgaggatgacgctaagccagaagaccggccagttggtcacacattcaacaccttcggtgggaagggggttgtcatgagatacgtgcggctattttgtaccgcccggtcgtatcctgttgacgcccaaatcccgcccgagaggtcgggatttttttatgccattaacccaccatcaggcttctataaggtgcgcgccatgacgctgctagcctggttcacggcctttctgctcgacagtctgttaggggacccgccacactggccgcatccggtgcgctggatcggtaacctgatcacggcgctacagcgcgcgatccgccggatttgccatagcgagagggcgctaaaacttggcggcgggctgctgtggctgggcgtcgtcggggtggtttggctggtcagttggggctttttaacgctgatgcagtatatccacccatggttgggttggctggcggaagtctggctgatttataccctgctcgccgggcgctgtctggaacaggctgccatggaagttcaccgggcactgcaaagtgccgatcttgaggagagccgccgcaagctgtcgtggattgtcgggcgggatacctcacacctggaagaaccgcaaatcacccgggcggtggtggagacggtggcagaaaacagtgtggatggcgtcatttcgccgctgttctttttgctgataggcggagcgccgttggcgatggcgtataaagcggttaacaccctcgattcaatggtgggctacaaaacgccgaaataccgcgctatcggctatgtgtcggcgcggatggatgacttcgccaacgggttaccggcccggcttagctggctactgctgagctgtgcggcttggctgaatggtttggactttcgccaggggcttcgcattggctggcgcgatcgctatcagcacaccagccccaactgcgcctggtcggaagccaccgtggctggagcgttgggagtgcgacttggcggtcctagtaactactttggtcagcgggtcgaaaaaccgtggatcggcgaggctcggcgggagatcgagctggcagatattccacgcagtacgcgtctgatgatgacggcctcgctattggctctgctgctgtttgcagcgttgcgcctgctatggcttggcgcttgaaataataattgtttgcgcggctcagctagcgcgacgcggagaacatgtgatgaaacggtgtgtgatggtgcagggaaccgcatctgatgtgggtaaaagcgtgctggtggccggtctgtgccggatcttcatgcaggatggctatcgctgtgcgccgttcaaatcgcagaatatggcgcttaactctggcattaccgcccgtggcgaagagatgggccgggcacagatttttcaggccgaagccgccggtatcgcacccgatgtgcggatgaacccggtactgttgaaaccgaccagcgattgccaggcacaggtggtgctgatgggcaaagtggcctgcaatatggacgcggtcagctatcacgagtacaagccgcagttacagcaacaaatcagcgaggtgtatcacagcctggccagcggctacgacatcatggtgctggagggtgctggtagcccggcggaaatcaacctgcgcgaccgcgacatcgtcaatatgggcatggcggcgattgccgatgcgccagtgttgttggtggcggatatcgatcgtggcggggtgtttgccgctatttacggcacactggccctgctagagccagaagagaaagcccgagtgaaaggggtgatcatcaataaattccgtggcgatattgccttactctactcgggtctggagcagattgaggcgctgaccggtgtgccggtgctgggtgtgatgccctggttgaatatcgatctggaagatgaggatggtgtggcgttgcaaaatggtaagtatgccccgacaggcagcagccatgagctggacatcgcggtggtacagctgccctatatgtccaactttaccgattttaatgccttggcggcccagccggacgtagggctgcgctatgtttcgcacccggcggcgctggccggtgccgatctgattatcctgccgggtagcaaaaacaccctgggggatctgcagtggctacaacggagcgggttggcggcggcgttacaggatcagcaccgtgctggagtgcagatcgtgggtatttgcggcggctaccaaatgctcggcaagcacattgttgatggcgtggaatccggtttggaacagatggcaggtttgggattgctggatgtcaccacccgcttcgcaccgcaaaaagtcactacacaggtgacagcacaatgtgagcctgggttgcccggcctctggtctggctgtggcgagcaggatgtcgttggttatgaaatccatatgggcaccacccagcttggctcagaggctacgcctttctcccgcctttccctacgtaacggccaaccggacagcgcttttgacggggctgttaactccaccggtaacgtgctgggcagctatattcatggcctattcgacagcgcgcctttttgccgcgcgctgctagaccagctgcgccagcgtaaagggttgccggtttatgacggcccggctttcgattatgccgattataagcagcaacagtttgatctcttggccgataagatgcgggaacatattgatatggataaaatttaccgcttgatgaccgagcaccaacaaacgggggcccaatgatcctgatcaccggcggagcacgcagcggcaaaagctcgctggccgaaaggttagcgagtggtgtcagtgagcgggtgttgtatatcgccacctcggtggtcaccgatgaggaaatggccgaacgggttaagctgcaccgccaggcccggcctgcacattggcgtacctgggaggggagccagcaactggccagcgtgatcgaccaacaggcggcggcgggagaggcggtgatcctggagggtattaccacgctgatcgccaacctgatgtttgacctgaccggggagacgccggtggaaagcatcgattttgccgtggttgaaacggcaatccaacggcagatcgacgatttgctggccgcctgcgcccgcagcccggcggcgatctatctggtcaccaacgagttggggatgggcattgtgccggaaaaccgtctggcacgtcacttccgtgatattgccgggcgtgttaaccagcgtttggccgccgctgccgagtcggtgctattggtaatttctggtattgaggtcaagatcaaatgaatttgcgactgttttgggccaccctgcaattgatgacgcgtatcccgctgcctgccagttggacacaggggttagcgatggataattaccagcgtggcatcatcggtttccccttgattggcctgatcgtcggtgcaattggcggcgccgtattcactctgttggctccctggtgtggggggccgctggcagcgttgggctacgtgctggcgttggctctggtgaccggtgccttccacctcgacggattggccgatacctgtgatggcgtgttctcggcccgcactcgggaaaaaatgttggagatcatgcgcgacagccgcctaggtaccaatggtgggctggcgctgatctttatcgtcgtggccaaggtgttggtgatcagcgaactggcactgcgtggggtaccgatgttggccacgttggcggcagcaggagtggcttgccggagcctggtggtgttgatgatgtatcgccagccctatgcccgtgagggtaatgggctggggaacctttacattggcaagatcagcggcggacaaacgctgttcactctggtgctaggggccgctttggtcgccttgttagggcatgggcaggggctgtttgcgcttggctatgcgctgatcgccgtgcttttgctgcgggcctatttgcgccgccgtctgggcgggcaaacgggtgacaccctgggtgcggcgatagaaattgccgagttgatcttcttactggcactgctgtgagtgggcgctatgcggctatttttggtacgacacgggcaaacggcagcgaatcggcagggcgtattttgcggcatgaccgacttgccgttgaccgaacaaggtgaacagcaggcgaggcagatcgcacaatggctggccgaggtgccttttacccaggcgatcagcagtgagttaagacgcgcccgacataccgccgagatcgtgcttgggcagcgggaactggtgatccaacccgacggtggctttaacgaaatgaattttggcgactgggagatgcgccatcaccaggatttacagcgggaggatagtgctgcctgggccgactgggtggcggattggcaactagcttgcccgccagcaggagagtcctttccactgttttcacataggatcgaccaacaggcccaacgtctgctgaacgaaccgggcgatggcgatcgtctgctggtggcgcaccaaggctctctgagcctgctgctggccgggctgctaaagctgcctgccgctgggatgtggcatttcccgtttacccagggagcctacagcgtggtggaactcaaccaggggtttgtcacgctaaaagtatttaacagccaggctcattggcagcctgcaagcagagaataaagttatgcaaacattgtcatcgttaatcgactcgattaagccgttggacgcggctgccatgcaacaggcagcggcaaagattgatggcctgctcaagccaccgggcagccttggtcgcctggaacagttggcaacccagttagccgggatgcgcggttttagtgggatggccgccagccgcaaacaaatcatcgtcatgatggccgatcacggcgtttatgccgaaggggtggcggtgtcaccgcgtgaagtgacggtgatccaggcgctgaatatggtgaaaggcaataccggcgtctgcgtattggccgccaatgctggtgccgaggtaaagctggtggatgttggcatcgacagcgcccccttgccgggtctgatcgacatgaaagtcggacgtggcagcggtaacattgcgcgcggtgcggcaatgacgcgccagcaggcgaaggagttgctgttggccacggctcaactgacgctggaacaggcggcgcttggggtgaagctgtttggcgtcggggaactggggatggctaatacgacgccggccgcagcgttagtcagcgtctttaccggccgcgatccgcaggaagtggtcggcattggtgccaacttccccagcgaccgtttacaccacaaggtggacgtggtgcgccgggctattgaggtaaatcagccggatactcaagatgcgctggacgtactggcaaagctgggtggatacgatttggtgggaatggctggcgtgatgttgggggctgcggcggccggtctgccggtgatcctcgatggttttctctcatatgcctctgcgctggcggtctgcggcattgcgcctcaggctcgggattacctgctgccgtcccatttctctgcggagaagggcgcggctgccgcacttgagcacctgaaattggcaccttatctgcatctggatatgcgacggggggggggcagcggtgccgccattgccatgcatatcgtggatgcggcctgcgtgatgtttaatcagatggggtcgttggcggacagtaatattgtaattcccggtagcgcgacctgaccggttgattaactcagcgagcgcagaatgctgcgcccgcttgtttcgcgttcttggaactaggcggtttgcaggctggttgcccggccaaacaggcgtttaaacagccagtaaatcacgctggctgccagcagtgagttaatggttggcacgccccattccgtcaccaggccaatcacgctaccgacgatgctggcgataatcgctgcccaaccgatgagcggcgtttcctgcggcagttgtccaagctggcggctggcgtccaaagcgtctcggtggctgcgcagcaggaaatagtccaccagcatgacgccgaggatcggtgggaataccacgcccagcacggtcaggaaatccacaaaccgatccaggatccccagaaccgaaagcagcgtgcccaacagaccgataatcaccgtggttgcggtgtatttcagctttttaccggtaatcccttcaaccgcattcaccacgcccaaggacgacgaatagaggttcagatcgttaacgcgcagggtggagaataccactaccagcaaaccgatgccgcccgcactttgagccatgatcgttaccacgtctgcggtgccgagcgttttggcaataaaaatcgccaggccgttaaccacgaattcaccggcaataatggtcagcagcgtaatgccaaacacgtggcgtttgtttttggagtaacgggtcaggtccggagtcatcaggctggcaacaatggcgccgccgaccacgatggtgatgcctgcgctgatggttaacgcttcccccataggggccagcagaatggcctcatgcagtttctgcccagagaggacgttataggaaataaagaacaccagcaggataaacagcggcaccgcaatacgtgctgtgatgcgcagcgctttaaaaccaaaagcgaccagcaccgtcaaaaacaggccggagagtgaggctgacagcgggaagcccaggcgatcgcccaaggcgaagttaagcgatttggcaaagatggcgttctgaataccaaaccagcccaacaggctgacggccactaccaggccgataagcaccgaacctatacggccaaagccacaccagcgagccagcaggctgccggaaataccttctctcatcccggccaaacctagcccgaacgtcacgaccccaaaaatcaagctgccaatagagatggcgataaaggcatcggtcagggtcattgagttgcccaatacggcacccaacataaactggtccaaggccgttagcatacccatatgcacgatggcgacgctgaggaaggagaccctcttatcctgcggtacccggctcaatgggtagtcttcaattttaatcacgataatctctcgttaacgtttaaataaattggatgcctttttcaatcaggcgtactggaatgtagctgtccaaattcaccagtttgcaatactcttcgaactgttggagtgtatgcacatcggctttttggtagatgttgtagattctattttctatggttttattgctgacgtcatataacctggcaatctctttgttggtgtagcgttgcagcatcaaaaatatgatatccagctccgactgggtaaaaatctggatgctgacttcggtggttaatatgctgggtttttgctggttgatatattttagcggtgagaaactgtccagcggacgggcgttccacatggtgccaaccagctcttccttgtcattataaataggcaatttttcgctgataaaggggaccagactgtcgctgccgtaccagaagtgcgtctcgatgacggctacgcgatcccgagttccttcggttttcctatcgtgttcttgcaggtctggggcgaactctgcccaatcggcagggaattcggcatcaagcttgcccgcaatatcgaaattgagaggtgtgttggtataaagataggccgccttgttcatataaatatggcgtgaagataaatctttaatgccccaaggctcatttaaatgttccatcatggtgatgagaccttttaaatataattcattgctctgccaaaatgaatccatttgaacccctcatacttcagcgttatcagatgtttttcgctaaatagatgcgagtatggcggtgcgcatagcccgctaagttgccatacggttggtaccccagtttttcgtaaaacgcctgcgcctgaaaactgaaggtgtcgacataggccatatggcaaccgcgcttgacggcctcctgctctgcccgcagcatcaggtcacggccgtagccttttttgcgatactcgtcacctacccacaggtactggacttctaatccaccccaccaggttctggcaaccagcccggctacgatctgcccacgctcgtcggtgacggtcaggaataacggatgaatatctactgcatcatactgatggttgtgcgcccagaggctgtcaatcacgaactcttcgtcctgcggatttggagtgtccgttacgttaatcttcatggccaatctttccttttcatgctaataattcaaatgttcattaaggtgtctgtattgattagcttttgttaacatttattgtcagtgattacaagggtgtttttcacctgttttcctggtggcaaaaaatgggtatgttgttggcaagagaagggaataattgacctttctcaacagtataccgaatagaaaatattgtgcttcaccagggatacgcccttaagggcagagggtagtgacaagagcaagccaacttgccaacagcactatgcctcactgaacatgtagtaagatttaccatcacttcacagtaatgcattgcggcaaagtagtggattaaactccgctactttgccgcaaaatccgcgccgttatcgtataattacctgtcaagtaccgcgtttcgtggtgcctcctcgcttcaagtggctccactgaggtattatggctgagcggcccatttcgcggccagcttgcaacaggtgagaaagtattgatggcattatgaaaacacttaagccacgccgccctcatgggaggtggatctattacattctgtacgaagatattctgtggccctgcccagtcaaatgggagtgggaagagaatttcgaggcatggctgcctttttactactcgcccactctggagtttgtggcaggcgatccggcgaaaaccatcaaggtgacgagaccccaaacgcccggcttgcagccgaaacgcctggagtacgcttgattcgggtatacccgatgattattcaaccattctctgaatgccgatactcgccaagtcatgctatcagggctgaaacaatccattcccaacgcacaaccgcttttctggcggagctcaattgagtaaatcgtgaacggtacggcgcacgtagtgggtcatttgtgccaggtcttcgggtgcaaccgggcctccgccagccaagacgacctgctgctcgatctgagtgatctcttgctcaactcggttggcgatttgcaccttgacgatcttgtctaccgatgacagcagaaccttcaataccactttcagcgcaatgttttcgcagaatgaatcgtaggagtgagctgttggcggcgcttctaccgccggtggcggcatgcgtggggccatagccttgaaactgtctacattttcaataataagatccatgtctcttattagttcatcaaaatctttagacactgacttatttccctttgcagtacgcaaaaaatagaacgcctggctttggtaggtggacaggcggacacagcttggatcgaccggacgttcaacggatgagcggtaggttgagcggcattttaaccctgctcgggttccgcaaacaagatagggatgattgatgtttcaccttctatgtataactgccagtgatgatttttcgctgaccatacaaagtgtattgccgcacgtagctctgataaccgggggagatgataaaaaatgcgaagggtattcagataaacacttagaccgcaacccgacaggcgccgcacaggctaaacttgaggggcagacattcacacagggaggagatatggaacccgaacgtggcattaagcgagtgatactttctgacggtgctatcaaacatgtggtggtggaagacgctatgggcagcgagcgcaccctgactgccgtagattacatctctgaggggatacagccgccgttggaaacgctgccggaagtcccggcccaggaagagtaaaaagctccaggaggatgggttgtaagccctaggcaccgggcggcgatttctgctgccaatccggcacgatattgcccattgccagccttttccccatactggcagaaattgtgtattttattgcacccagcaggaagggcaagtcagtgtcaacggtcaagaaaaactctactcccacgctgtttctgaaaatcaaaccccaagaagccgtgctagtctttatcaccatgctctggggaggcacttttttggctgtacatcaggcgatgctggtcagtgggccattcttttttgtcgggctacgctttggcaccgcgacgttggcgctagtgctgttctctctgcgttcgctgcgggggatgacctggtacgaaatcaaagctggggtgtttatcggcacctcaatcatgttcggctatgggctgcaaaccatggggctgcaaaccatcaccagcagccagtcggcgtttattactgccatgtacgtgccgattgtgccgttattgcagtggttggtccttgggcgtatgccggggatcatgtcctggattggcattctgctggccttcgtcggcctgatgctgctgagcgggccaagcagttccagcctggcattcagcggcggtgaattcctcacgttggtcagtgcgctggcgatcgccattgaggtgattttaatcggtgcttttgcgggcaaggtcaacgtgcggcgggtgaccattgtgcagcttgctaccgcgtcgttgttatcgtttttgatgatggctcctaccggggagtcggttccggcgttttccaactatctgctttatagcgcggtagggctggggatagccagtgcggtgatccaactgacgatgaactgggcacaacgtagcgtttcacctacccgtgccacggttatttatgccggtgaaccggtatgggctgggatagtcggccgtatcgccggtgagcgtttgccagggttggcgttgattggcgcagggttgattgtgttgggggtgattgtcagtgagttgcgtattcggcgaaagccaaagcctgcggagttaacgtagaggcgctgcatgctgcgcctgtaaaaacgccgcgtgagaacgcggcgttgcaataaccaagatcaggccgccttcttacggcgtacaaactgataaccgatccccagaatgataaaccacagcggcgtgacgaccagcgcctggcgtgtgtcctcgcgcagcgtcagcagcaccagcacgaatgcgaagaacgccatgcatacccagcacatcaacttaccggcaggcatcttgtagatcgatttctggtgcagagccggacgttgcttacggtagaccagatacgagcacagaatgatggtccagacgaacatgaacagaatagccgacacggtggtgaccagcgtgaatacggtcatgacgttcgggataagatagatcagcaccacgccgcccagcagacagatacaggagaaggtcaggccgtttgccggtaccgcacgtttggacaggttggcaaaggatttaggcgcatcgccttcctgtgccaggccgaacagcatacggctggtggagaacacgccgctgttggcggaagaggcggcagaggtcaacactacgaagttgatcacgctggctgcggctggcagaccaatcagtacgaacagttcgacaaacgggctcttatcggccaccacagagttccaaggcgttaccgacatgatcacgatcagcgcgaagacgtagaacatgatgatgcggatcgggatggagttgatggcgcgtggcagcactttttccggatctttggtttcggcggcggtggttcccaccagctcgatacccacaaaggcaaacaccgcaatctggaagccggcaaagaagccgctaatgcctttcgggaacatgccgccgtcattccataagtgggagaaggaggccacgctgccggttggtgattcgaagtgcatcgccaccatgaccagaccggcgatgatcaggcccactatcgcgacgattttgatcatcgcaaaccagaactccatctcaccgaacattttcaccgttgccaggttcaggctgagcagcagcaacacgcacagtaaagaggcgatccattgggagagatcggggaaccagaactgcgcgtaggcggtaatggccaccacgtcggcaatgccggtcactacccaacagaaccagtaagtccaaccggtgaagaaccctgcccaagggccgaggagatcggcggcaaagtcgctgaaagatttgtactgcagattggagagcagcagttcgcccatcgcgcgcatcacgaaaaacagcataaagccgatgatcatgtacacgaagatgatggaaggcccggccaggctgatggtcttaccggaacccataaacaaacctgtaccaatggcaccgccgatggcgatcagctggatatgtcggtttgagaggtttcgccttaggtgatcttctgatccgggcgtggcgtccactgctattttagaatgatctaccatcttatgctgtcctgtttttacctgtcatgagtggaatggcgagctctgaagtggctcttttttatctgtattcgccggtttttccgacaaaagttaaggtaactcaatatcaccacctttgtgcaacatatttacaacataatgggggtgggataaaagccgattattctttactcaggggaggcaaatcggacgtctagggggcggaagattactctttactgcggtaaatgaacagtggcggaagtggttatctcattgattaaacaggggcttataaagttagcatgagaaaaactaatgataaaaggcgattaaactaatccagatgcctgccggtgcttgaggggcgttaatagcgggtgttgcgcggggagcagttgagttctaatcagtttattgctgcagctggcgcggcttggcagaggatcgccgagcgtgcagcgtacatttggttagttttgcggttcaaatcacaaaagtataaatcattggttgagtcactgtggtcaaaaggtcgagaagccaccagctacacctgctgatcacaaaagcatcataaataggtacaagctcccattggccagcggtaagctgtgttcatcacggtaatacagagaggggattgaatatgtacaagaccattttagtaccggtagatcttgcagaagacgtattgactgaacatgcgctcgaacacgtggagtatctggccaagatgtctggggccaaggtgcatttcttccatgccttgccggatgcttcggcgtttgtgaccgcctattcgtttggcatcaaagagtttgaaaatcaggctgaagtgaaggcggtggaggggctgaagaaactcatggcgaagatcgacctgccgttggagcgtctgtcttataccatcagcttcggttcgccacgtgacgaggtgttacaacttgctgaggaaatctcagccgatctgatcgtgattggctcccgccgtcctagtgtcaaaacttacctgctcggctcgaatgcggccgccattgtacgccacgccaagatctcggtgatggtagtccgataattcactggttagccttcatcaaacccggcccgcgccttgcgggccaattacccccaaagaaaacggcacttgccagcatgcccgtgcagatactgtgcgaaaggtgagttaattcctagtctatagggctatttattcgcatcacgaacaataatggggtaataaaaatcccacaacattattaatgtttaaatgggactaatcctattgttgttttttaactattgattaataagagggggtagatattgattaagacaatgatagaaaatattctgttacgaaacttatcattcaaccgctgaggggggttaaaatacaccgccaagccgttatcagaccccaagcggggggcctgatagcgcacggattattggcggtaggcgtgcttgatctgctgaatactgttcttgaagatttcagcctgatccgggtcatccacctgagcggcaaagcgttccagattgatgatcactttaccggcatcagcctggccaatggcctttaatatcaacgtcaaagtcgcttttaggcaggcaacttcggtggccagcgcttgtgggtctgcagacgtagtgaagtcaacgttgctcattttatctcctgaattttaaggcgtaagcctgaagtgaaatgtgaaaatgtggtttgatgcacaacaaccggctgccgactcacccaggcagaccccgtgcctcatttagggcgcggagtatatcacagcattggcagttcgtatcgcgtgtggccgggtggcgggggcacgatgcccgtgagggctggttggcagggcattttttccgttagtggtgtaattccttcgcatactcatttatagttagtgatagggtgcgtgctttcagactgcgtggattttataaagtaatactggcttaattcgacgtgatgaataactatttcatctgcaagctattgacatttaggtcggttattttctcttgaaatgtcacctttttcgccgtccacagcggttatgtattctgaataagggtttccctatagcggtttgtacgtgattaaaaatggcataattttgttatttttttgtgattcatatagttacgggtgataattggtgggatggttattatctggttttgtgaaaacagcgattaattttcccgccagatggcgtaaaatggcgtatcatggtgataatgtattgagcctaataggcttgatgtttttttatccgttagccagtggtttaatcgtaacaaaggtggcgcaggggtcgacaaacctggccatagttaaccgagagtaagtattaatctgtattcattctttgctgaaaaccaagtaatatctgtttagatgacagaggctgattgattgcgttactcccttattttggagaattttccttgattagcgttcttcttgttgatgaccacgaactggtgcgcgcagggatacgacgcattcttgaagatatcaaaggcattaaagttgttggcgaagcacaatgcggtgaagacgccgtaaaatggtgccgcggcaactctgtcgatatcgttctgatggatatgaatatgccgggtattggggggctggaagccacccgtaagattgtacgttacacgcccgatatcaaggtcatcatgttgactattcatactgagaacccgttgcctgccaaggtgatgcaagcgggcgcggctggctatctgagcaaaggcgcagcaccgcaagaggtgattaacgcgatccgttcggtacatgccggccagcgttacatcgcttcggacatcgcccagcaaatggcattaagccagttggagccgcaggcggaaaacccgttcagcaccttgtctgagcgtgaattacaaattatgttgatgatcactaaagggaagaaagtgaatgagatctcagaacagctgaatctcagccctaaaacagtgaatagttatcgttatcgtatgttcaccaagctgaatatcagcggggatgttgaattgacccatctggcgatcagacacgggctgttcaacgcggagacattgttaagcagtgaatgatcgttttgatgcaccggcatttcttaaaaccgtaaccagtcagcctggcgtttatcgcatgtatgatctgacggggacggtgatctatgtgggtaaagccaaggacctgaaaaaacgtctcgcgagctatttccgcactcaggtcagtagccgtaagacggaaacgctggtcaaaaatatcgcgcaaattgacgttaccgttactcatacggaaaccgaggcgttactgctggaacataattatatcaagctgtatcaaccccgatataatgttctgttgcgcgacgataaatcctatccgctgatttttttgagtgccgatagccacccaaggctgacggtacaccgtggtgccaagcatgccaaaggcgaatactttggcccgttccccaattcttacgccgtgcgtgaaacgctggcgctgctgcaaaaactgttccccgtgcgtcaatgcgataacagcgtctaccgcaatcgctcacgtccttgcctgcagtatcagattggccgttgtctggggccatgcgttgccggtttggtgagtgaggaagattatcgccagcaagtagactatgtgcgcctgtttttgtccggtaaggatcagcaggtattgcaccagttgattgagcggatggaaaacgccagcaaactactcaattttgaagaagctgcgcgtatccgcgatcagatccaggcggtacggcgagtaacggaaaagcagtttgtctcaggagacagcgacgatctggacgtgatcggcgtggctttcgatgcgggtatggcctgcgtacacgtgctgtttattcgccagggcaaggtgttaggcagtcgcagctacttcccgaaagtaccgggtggtacagaactgagtgaagtggtgcaaacctttgtgggccagttctatttacaaggcagccaggcgcgcaccttgccagccgagatcctgctggactttacgttaccggaaaaagatctgctggctagctcgctaagcgaactggctggccgcaagatccagatccagagcaaaccgcgtggcgatcgtgcccgctacttgaagctggcgcgtaccaatgcctcgacggcgctggttaccaagctttctcagcaatcgactatccatcagcggctggcggaactggcgaaaacgctgaacctgaccgaaatcaaccggatggagtgtttcgatatcagccacacgatgggggagcagaccgttgcttcctgcgtggtgttcgacagtaacggtccgttgcgctcggagtatcggcgctacaatattaccggtatcacgccgggtgatgactatgccgcgatggcgcaagtgctgaaacggcgctatggtaaggctctcgaagagagcaaaatccctgacgtcatctttattgatggcgggaaagggcaactgggtatggcgattgacgtgttcaattcgctgaacgtgacctgggacaagcacaaaccgttgctgatcggtattgccaaaggcagcgatcgtaaagccgggctggagacgttgttcttcgtccctgagggggaggggatttcgctaccttcggactcgccggcactgcacgtgatccagcatattcgtgatgactcacacaaccatgcgatcaccggccatcgccagaaacgggcgaaagtcaaaaacaccagcgctttggaactgatcgacggcgttgggccaaaacggcgtcaggtgctgttgaagtatatgggtggacttcaaccattattgaacgccagcgttgaggaaattgcaaaagtgccgggtatttcacaagcattggcagaaaagatctacaatgcattgaaacactgagggcaatgtagcaacatactcttaatttccactccagccagatagttaccagcattatgcaattgaatataccgacttggcttaccctgttccgcgtagttttgatcccattcttcgtactggcgttttacctgccgttcgtctgggctccgatgctctgtgcggtcattttcgtgtttgctgctgtaaccgattggtttgacggctttttagcccgtcgctggaagcagacaacccgctttggtgcgttcctcgacccggttgccgataaggtgatggtggcggtggccctggtgctggtagcggagcattatcacacatggtggatcactctgcctgcggcaaccatgatcgcccgcgagatcataatctcgtcgttgcgcgaatggatggcggaaatcggcaagcgcagcagcgtggcggtttcgtggattggcaaggtgaaaaccatggcgcagatgatgtcattggttggcctgttgtggcgtccagaacgtacagtggagtatctgtcgttcggcttgctgtacatcgccgccgtgctgaccttctggtcaatgttccaatatttgaacgcggcacgccgcgatttgctggaaccttgatcgaagcgatgtaaaaatcggcaaacgaacccggtgagacaacaattttattgactcaccacgccagataagtagaatgcatcgcatcagacggcagcggtgagttgccaaaagagttaaaaaaatcagcaagttctgattaatgcgggaatagctcagttggtagagcacgaccttgccaaggtgggggtcgcgagttcgagtctcgtttcccgctccaaatttagtaaagctggtgattgcgagctttagcctgcaaaggcaaacagaattaaggcgcgttaacaaagcggttatgtagcggattgcaaatccgtctagtccggttcgactccggaacgcgcctccaattttcccgagcccgggtggtgaaatcggtagacacaagggatttaaaatccctcggcttatggctgtgcgggttcaagtcccgccccgggtaccaggaaaataaactaagaataatcaaagcaatatgtagtaatgtcgtaccgccgagaggcggtttttttgtgcctgaaatccgctttggaagctcttcagaagaggttttcggaagatagaagccgaagacggcatactatccagtcctacttgcggcaactcctgcaactttttctcgtcactcccaccgtggaactctcccccaaagagattccagcaatgccaactattaatggacaaccagctatggaatcacaggaactgtactcatttctctctgatgatcgattggtcgacttggtcgagtgtgtaaaggtttcggatgactttctggatgttatctcgctgtctgaaacgcaacactccgatatgcttgcctggtgtctccatcctaacgaaggccatgggcaaggtgatgccgtggtgaaggacttgttggtggctgcctataatgcaggcgctcagacgaataagttctcaaatagggccttttttgagaaatggacaccaggccgtgtacgcacagcaagcttcggttctgcgttcatcgctagggaattcagtttgtcagtcagcgaggccaataaaagggggcgccttgacctatttttgattgatccgaacaatcgtatcgtcgtgaccatagaaaataaggccggagccaccttaacggaagagcagttgagttcttattacactgctgtgaacgctcaaattagcagtcgcaaggtgtttaaagattacgattttgcctatttggtggtagatcgtgatgtatcgcaatacaccgaagaacatttaaagtctttaggcaataagtgggctttgctcgactatagctggttagaagcgtctgcaaatcgggctcgccatcatatagagcgtaataaccaagccgcccaattgctgatggcatactgccaaaagcagacgggatggcaaggcccgaacgaaaaacgcgtttcagagctagcagcagagttagcttcccagcatgagacagtggtggaagcgattaaagaaaacagaaagctacggccaacagaatggaaaccacaacactttagtgggccggaaagcgaactgctgctgttcattcaacaaaaccgccagttatgcgatctcctggttcaggctcgagggatcggttctgttctggtcggtttgcgcaagaaattcccggaccttgatcatgaaaacatcgagcacggacgtttatggcttagatttgccacggccgagatggaatctctgatgcagagctctgatggatattggccaatttatctgaatatctttcgtgagaccaaaaatgatgatgaaaaatcgaaattcacgttaagacttgtctgggtgaaggccgagttcaatgacgatgaatgtgatgttcaagcgctgagggaccatatggcgaaaagtttccctgggctggagaaatttgacagcagcatgattaggcgattggtggtaggctccaaactaagcgcaggagaggtggtaaaaaaagcggttgagattgccactaaagtagaatcgcaagttgccgcagctcggcacaatgggatactccgatgaatcgccacgggtatgtatgacagtaacttgttgttttgctagttctactgaactttttaaaatttcatccactgatggctgtacggggtcatatcccgtccggccaggaaagtaaatgtagaataatcagagcaataagtaataattttgtgccgccgagaggcggtttttttgccggcacctcctttcaagctgatagccgcattttatttggcgttaatcactcctttgctgcctgcatcattatccacccagacatcttcccccttgaggcggcggtcgccttgaatggtataagtgacgtgaccgttcctgaacaccagtgcgccatcagatttctttgctttcacctgcttgccgttgaccaagacatgatccttggcatcgatactgattgtcgctaccgtggcacccgtctgtgggaatgtggcaacccactcaccggtatatgggctggcactggtgtcagcagcgggagcggctccaaaaccggccttggcattctcggccttggttttgtgaatgtcacagccttgggcctcggtcacttgggtgcagccagaacgctctagctgctgggcaaattttgcgttgatggcgtgggctggggcgatgccaagtagggtaagtgtcagcataagagctgcattttttgacattgtagttcctcctaaaatgagccgagccaatgccactgaaaaggactgggtattttggtggctgaggcgcatatctaaatctagcattcattagcccttacgcgattcgacaagtagcgaggcattttctcaatcgatggttgaattcaataacgtagcgctatggtttccctatcgtcgatttataaattgaatggattcagcccgattttgttgctcgcggcaactggtatgctacaaaactcggctattcaatcaggagatgacgatggaatttgaaattgagattattaatccggcgaaacacccagaactagcggcccagcaggtggtgatcgagttgatccgcgctgggaaaattgacaactcctttaatggcgccaaagcgttaaatacttaccaaaatctggtggaaaaatataaagcattagctgcacagcccggtgctgttcaggctaaggacaacgctatagagccccctgcctcggaggttaagatggctacaacgccaagtaaacctgttgcggttgcggccaaagcaaaaagcaatgttgccaagccctccgcagaggcaaaagcgagaaccaaggtatcggcgtcagcggttaaagagtcaaccgttgctgcagaagtcgtcgccaagccaaagaaagccaaaccaaatccgactactgccaagaaaaaataatccttctatgctcgcgcaactaactcaagattgggcgcagcagcgcccctacgtcttgagtcggttggatcaaacgactatttcgtagagactatgctgataccttctgccggtagcggcagcgccgttttatagcgcacctgcttgagggcaaagctggagcggatgttggctacgcccgggatcttggtcagatgatccagaataaaacgctctagcgcacgaatatcgggtaccaatacccgcaacagataatcggcatcgcccgtcatcaggtaacactccatgacttctgggcgctgatcaatggcctgttcaaagttgctgagtgcaccttcaacctgcttttccaaactcacctgaataaatacgttcacatggagcccaagcacagccggttccagcaaggtcacttgccccctgatgatgcccaactcttccatggcttttacacggttgaagcagggagttggggacagattgaccgagcgggcaagctccgcattggtgatccgcgagttcgtctgcatcgagttcagaatggcgacgtctgtgcgatcaagcttcttcatatgagaaaatttacccttaaaatgtgatgtatgaggttaaagtgactcataaaagccgattgtatgaacataataagagaaagtttccccggttatccagataaaattagcatattgaatgaatggatgagaaaccgctgtggatactgagggtaaatacttaaccggctcgccaaacgtgtcgagctacgcgcccgatagcgtgaaaatcaaaggcgtcctgctgttggttggggccattgtgatttggggggcgaactggccggtgatgaaggctgggctttctcatatgacgccgatttggctttctactgcccgatttgtcagtggcgcgctgtgcctgtttgctctgcagatattgaccaagaagctgcgattcccgccacgcaaggattggccgttggtggtgagcgtagggctgttgcaaatgctgacatttaccgtgctcggtgcctttgccatgaccgaagtgcctgctggccgatccgctatcctggcttacaccacgccgctctgggtcacgcctatcgcagtgttgtttttccgtcagtcgctttcacgtcggcaattgatgggctcgttactcggtggtgtaggggtcattgtgttgttcaacccgttcacgtttaactggggcgataaggttctcatcgtagcgaacctgatgttgcttacggcctcttttgcctgggctatgtgcattttgcacctgcgttatcataaaggggtgtgcagcgcgtatgagctggctccctggcagatgctgctggccagcgtgccgttggcgttgatggctcgggtcttcgaagggccgtataccggcgatggttctacatcgttaatcgaaatactgctgtttatggggccgctggcgaccgcgttctgctttgttgcggtgaatgccgccagcatgtggttgtcgagcaccagcatgtcgacggcgatgcttggggtgccggtaataggcttactgatgtccgttatcttcctgggggagcaattgactctcacgctggctattggcctgctggtcatcatgtcgggtatttttattgtgacggtaaagccatcggcaagtggcattaagactccgtagcgttatcagtctggccaagttaccttggcctgcttacgtctgtgagttgggcttgttctaatcatttctcgccaacctttctctgctgggccgaaagggctaccaacatcaatcccgtaatcaatgagataccaatgattaatttccaggcatccgggtaaccatagctttgtatatacgcccccatcaagatatacgtgggcattaagccaaggctccgaatggtggtgattatcccgctgatgcgcccacgatggctgcgtggagagttattggctaaataaatcccctccttggtgacgagcaagatctcgccgatggtaaggaaaaaccaggcaataaactgcatggcaaccagaggggatagcagggtaatgccatatcccaatgctaacgcaaacgcggaaatggccagacttttaatgtcgcagatgttgatggtcattctgataatcaacggtgtcatcaccaccaccaaaatgctggcgaaagtcattaactggccaaacaagaccggcccttgttggccaaaaatatggctaaggtagagcggggcagtcatggtcatttggtttaatgaaaaccacagcagcatacataacacgccgaataccagcaaccgaggcctttgcttgaacacctgccatacagaagcctctgtggctttttccagttcggtgtgttcccgatcgtttgttgcccgattgtcggcgggattagcgacatagaataaaacgatgactacgcctatcaggccagcgagaccattgccccaaaaaatccaggccgtgtagttccagaaaaggtagccagccagaaccggaccaaccccagagcccagattgtaggcaagatagcttaacgacatcaccgcattgcgattggcaggggtagatagatcggcgacaagggcattacttgccgggagggctacaccaaaaaagaagtagctgacaaaaagcaacgcgggtagcaggctgtgccaatcggtaaagaaaccactcacgaccaagattatcgaaccgatgatctctccccaaatcatcatgttcttatggccgaaactatcggacatcttgccgccgaccagattccccaaaagatagaatgcggtgactcccatcgccaggccgcctgccatggttgttgaatagcctaacttttgcgttagcagcagtaccatgaacggtatgatgaaattgccaagaccaagaacaaatctggctaaggcaataaaatagacgtcgtttggtaacccttggtacatggcgacgggattgaaaagtcgggcgggcaagggcacccccttaatcattactgttgaagttaagggacgcaaagcaatgaggtatccgaacctgataactgtggccttcctgaaaagtcatggcaagttagcatgttcgaggggggaagcaaacagagcgaggcggctggcaaagtcttgaccggcttcatgctgcccccattgagagtaataaaaaggccagagtcgttacgctaacgagctctggcctgtttgttcaccggggagaattaatccagttttggatgctggtcgatcagcgtttgctttttcttctccaaatcggcgatttgctggctgatatcttcgactttctgctcgatattatcgtaagtttcctgcagcagctctttggcttctgagcggtcagaggcggctggagcagcaccgcgcagcggcttgttggccgtttctttcatatacagaccggtaaccagaccaatcgctgccaccaccatcagataataggctggcatatacaggttaccggtgctttcgaccagccatgcggccagcgtaggtgtgacgcccgcaatcagtaccgagatattgaatgaaatcgccagcgcgctgtaacggatgtgggttgggaacatcgcaggcagaatggaggccatcaccccgataaaggagttgagcaacacggccagtatcaagaggccaacaaaaatcaggccgataacgttactgttgatcaagataaagctagggatggccagcaacagcagcccgacgctaccgccaatgatgaaaggtctacggccaatgcggtcgctggtcatgccgaccaatggctggacgaacaacatacctagcatgatggcaatgataatcagcacgccgtggtcttcggaatagtgcaggttatgcgacagatagcttggcatgtaggtcagcagcatgtagtaggtcacgttggtcgagatcacgatacctacgcacaccagcaggcttctccagtgcttggtggcgatctctttgaacgaagttttcggcgggttctcaattgccgcacggtcgttctgttccattttgtccatatgctgctggaatgccggcgtttcttccaaggcgtggcgcaaatacaggccaatcacacccagcggtgctgccaggaagaacggaatacgccagccccagtcgaggaagttggcctcacccacgatgctggagataagtaccaccacacccgctcctaatacgaagccggcgatggagccaaagtcgagccaactgcccataaatccgcgtttacggtctggtgaatactcggctacaaaaatggctgcgccagaatactccccgccgacggagaagccctgtgccagtttggccagcaacagcagaataggggcccagatgccaatcgaggcgtgggacgggatcaggccgatacagaaggtactgatcgccataataatgatggtgatggataacactttctggcggccgaatttatcgcccatggcaccgaagaagacgccgcccaaaggacgtaccaggaaaggaaccgagaaggtggccagagcggcaatcatctgcacgccgggcgtggcgccagggaagaacacctggcctagtgcgtaggcgacaaagccgtaaacaccgaagtcaaaccattccatggcgttgcctaacgcggcagcggtaatggctttctttaacttgctgtcatcaataatcgtgatgtcattaatctgtagtggcttatgctttttttttcttagcttcataaatcatcccatgcaaaattgatcgtaggcgagttcgtcggcccgctcatttttattggtcaagatatcagtcaggctaatgtcacctctgttttgcagatcgtcctcgtggtttttttctgagagtctcatcacaataaatagggttttaaacaaaaaatgtcatcctcaggattagtttttcttgtcatatagcttagcgttatctggagtttgaatcaaaccgagtaaaaaatgttatgtttttcagtggcttttacggcaggattatctgagggatgggccagttttcatcaataaagggtgttaaaacgtgttcagtatgtctccgaacacctgtctacactgtccccgaacagtacaggaatgatacagggctaaggccccctcacgaatgcaaaatcagggggcggtgctgctagcagttcgtccggttaaggcttgccgtcatagccatcccagtaagtggcgatagcattttcgagcaggatctcacgctgttttttcggcgagtcagccgtataggattgattaaacatcgtcgccttttgctccgactcaggtaaaaaatcagggctgcggaacccattcaccctttgctgtgcctgttcgcgggtcagcccatcctggcgatcttttttgcctatctgataaaactgctcaaagaatgggatggcggctttcgtcgattttgagatatcggtgcgtgtatcggggccgaaatgtgcctccgccaactggaaggtggcatggcgggcgtgtctttcaacgctgttttgtgaggtggtgcaagcgcagagcaataacgtggctaacaacgggatcgagcggtaatgtttcggtaacatgtgaagctccttgttataggtattgaaggttccagaggatgtcccgctattctatcccagtagcaacatattgaaacccatcttgatagtgcaacccttgctacacttattacaggcagcgttgcctggtgagtggaggtggatatgtctgataccgaactgcttcaagtgcttttgcagcgtatagaggcattggaagcccgtgaacaggcactcactgcggcctccaatgcctaccaggcaatcatcaccaccctattaggtaatatggataaaacagcgtgcgacaaggtgatctcaatgatcgatcaggcacatgaaatcgcctatgtacgagctgcacatcgctgtgacgaaccgcagaaacgtaaaatcaagcaggcggatgatgtggcacagcgtatgtttatggtcgcgcaggggcagggaagggcatcacagtcacgctgatcctataacagtttgcggcgaataatgcaggaattgatctacctcaataaactgtcattgtgatagcttgggctgagattggtgatagtcacgatgcgctgaggcattaaggtatagcgatggatacgattaagaacatcctggttacagagatagagcagattaaccggcgggaagggcgtgacggcaagccgcgtttcaacagcgagtttgcgcgtacccaccgttggctgtgttttgccatgttcgctggctattttgcggtgatcgcggtgatgtatccggtgccctatatggggctgtattcgttcctgggttttactgcctttgtgctgtttatgtttgccatgctgctgattgaaatcaaaccggtttaccgttttgaggacatcggcgtgctggatctgcgagtttgttacaatggggaatggtactttacgcgcgcgctgtcgccgcaggccatccaggcactgttgaacgaacctacggtgagcccggtgttgaaaacccgtatgcaggaaatcatcgccaacaagggcgagattgatttctatgacgtttacgatctggcctatgccaaaaggttatccaccccgtcagcaccgcaggccgtgctgagctgaataggttgcgcgggtgtcgatgttggttataatagttgttggttatgagactattcttaggaaatagcgatgagtgatgatatttttgattttgacattgatgatgaattagctaaagcggaaaaaaacgcggcgcagaaggccagggaagttcctgaaattcttgaggatgaagaagactgcgaaggctgcaaaatctgattgaattgccaaaaaaaccgctgcggcggtttttttatgcccacccgccagacattgcctcaatccagcacaaaaccccagatcaacagcccagccacggtaacgaggcatagtgcagacacggtcagcagcacttttcccagtaaatctttctcttgttgtttttgcatcaggttacatcatccaagtagtattcgatggaccaaatcggcgatacccaaatccagtaaggcaacgctaaaagcgatgacggtcaaggctgaaaagaacttcgctttgctgctcaagatcttatccgacggttgatgtgccgcaaacggcccacctcagcgttgaggtgggcattaatgacagtcattaagagttatccgggccggattagttcccgcaacggcatggttaatggcgttcaacgggttaatcggtaacgatcttgacgcctattttgctgatttgattagcatccatctccgcgatagtccaggttaaaccatcccattccacctgatcccccaccacggcttctcccccgattaaccgggtgacgaactggccgagcgtttgctgatcgtccacgccctcttgcagattcaggccgtaaacctgagaaatatcactcaggcgcgcatcggattgcagaatgaaatcaccgaagaaccgctcatccagcgtaaccgtaggtgcctggctgaacagtttacccaacgcaggcaaatcgtgttcatggccaataacgcacagggtatcgcctgccagcaagcgggtgctgccactcgggtgtaacagttctttgccacggaacagcgcggcaatgtgcgttcccggcggcatcttgagttcgcgcagcgctgcgccgacgcaccagttttcagcgcttagctgatagacaaactgctcccattggttttcctggtgaacatccagccccacgcgcgagatcggggctaatgctggtggcaccaccaccttggcctttttggcggcaaaggacagcgaagtaccctgcaacagcagtgaaaccaacaccacaaagaacgcgacgttaaagaacagattggcattgggtagtccggccatcattgggaataccgccaggatcaccggcaccgcgccgcgcaaccccacccaggagataaacatccgttcgcgcaggttgaagttgcgaaacggcagcaggccgataaacaccgaaatcgggcgggcaaacaggatcatccacagcgagagcagcagggcagggatggcgataggcaacaggtcgtgcgggttaagcaacagccctagcaccaggaacatgccgatttggctcagccaggccagaccgtcgaaggtttgcacaatgccatggtagttacggattggacggttacccagcagcaggccgcacagatagaccgccagaatgccgctgccatccagagcggtagtcagggcaaagatcaagatgccgccgctcaccgccagcagcggatacaacccttccgccagcttgatgtggttgatcagcgtgatcagcaaccagcctccgcccagaccaatcacgatgcccataccaaactgctgcaagagatggacgatgaacatccagctcagcgaggtttcgccagcggaaatcatggcaatcagggtgatggttaaaaacaccgccatcggatcgttgctgccggactcaatttccagcgtcgcgctgacacgctcgttcagccctttgccacccaacagtgaaaacaccgcggccgcatcggtcgatccaataatggcaccgatcagcagcccctggatcaaatcgaggttaaacagccaggcggcggccaggcccgtcagtccggcggtgatcagtacgccgatggtggccagtgacaatgctggccacaacgcgacacgaaaggagctgacgcgggtacgcataccgccgtcgagcaggatcactgccagagccaggttactgaccagataggcggcgggatagttatcaaaggcgataccaccagggccgtcaacaccggccagcatgcctatcgccaggaagatcaccagaatgggaatacccaggcgtgaagagaaagaactgagcagaatacttgctcccaccaacacggcaccgatgatgaacaagctattgatcgtgctggcatccaaaataatgttctcctgcgagttgagctgaaagggggcgccaaagcaaagacaccgggtcataatagcctgtttttcctgtgcaacgccaaggctgattgccaaaaaatgatgtcattatggctacttgccgcaaaatgtgatgaaaagagaggtgaaatgtgggtcttgcggcttttgtgcctatttatcagatcattgaggacggtagcaaacaggttattgatgaaaaaccattaaccccccagcaggaggcttaatggtttgcaggcggggggttagtgatcgagtgattgcagggcacgcttgattaattctgctgccagtttcctttcggcctcggagatcccgtccaggttgaggctggaaagctcggttaccaatacgctacgatctttgccgctgatggaggaatccagtgcggacagcagtctacccaagattttcagtagtgtggcgttttctgctacggtttcggttgccgcggttggtttatcggtcattaaaaatcctctctgtcgtgacggaagggaaatgttaccggcgcacgcgatggtgatgcgccatcccttagggttcgtgagcccaatcgctaccgtaaggcagggatgtggattttttcttatgcactgtagttataacaactcaccgcaatatgctccagcacaactttgcatcaacgggtcgcgataggttgagcaataggtgcgctgaccaccgatcaattatagctaagcgggcacagcatgcggcgttcctacgagggtgaagggtgtcatgttagcagggcgctgcaagcaacgcccttacaacagaggctaggctttgccagagaacagaaagcgtaacagcgggatgcgcttgtgcagctcatataacagaaaggcgcaggcaaagacgaacaccagacccagcaggaaacccagcagattattatcgattagcggagtcatgaaggccccgtatatcagcgtcagcggatggtgaaccagatagataaacagtgaagcgttgaccagataggtaatgcgaggcgaatggaaatcgagcagcgcatggccaaatgcgaacaccacgttggccatcagaaccccgagcacggctttgatcatgatttccagttcaaaaccgaagctgctgtgcgccaacagtttctggttgagcatgtaggccacgaacagtagcagcgagcccagtacggctggccatgagggcttgaggaacaccgctttcagccatggatacttaaaggcataggcacccacaatgaagaacggcaggtagaacagggtttccatcaccacgaagttgaacagcccattagacagtaaatgcggggcggtgattaaaataatgcgatgaaacacgcagtatataaaggcatacaataaaaaccacaatgagatattgctgagattggtcatcttatttattggctgcggtgccatcgatgtttttatcgctttaatttttttaaacagataaaaacaggcgcaggtcaataagcataaggttaataaaaaccacagatgggagaccaactcccaaaccgccacgtttattttttgatagggggtaaaatcatcccagccggttaatttatcggtgtagttcttgagtaaaaaaaactgtggcagggtaatcaatgggatagagctcaacaacgggatggcaacccgctccaggcgtaccttcaaccagcgatggctgtcatagcgttcatacagcatgtaggagaagtagccggagataatgaagaacacctgcatgcgaaaggcgtgaataaagtcgttcagcaccgtcagcgaaaacgacggggtcgcgctgtttaccgcccacgagtggctggagtaaatcagagaaagatgaaaaggaatgcccagcagcatcaaataggcccggatcgaatccaggaaaaactcgcgctggttagtgctgtcagtcataggttaccgctggtggttgcatctgggggagtgtaaacccgcttaataagtcggcaatgggctaatcgcaaacctaaaccctactatagcgaccgacatttttccatagcgtcttggagcccggcttgctacgctgcacaactgcttaaactctaagccgtaaacatcaactcacgtttatcatgttgtcggcgagctgaataatccattaatatggattttgaatattttgagcacacgaatagggggggatgtgctagtaaatctattatcaaaaaaaccacgcgccacgagcgtacgttggttaggtgctaccgttttgtgcacgttgttgagttcgcaggcttgggctttttctatcgacgatgtggccaaacaggcgcaggatctggcaggaaaaggctttgaagccccgaagagcaaccttccttcccagttccgtgaactgaagttcgcggactatcaacagatccagttcaatcacgacaaagccgtgtggagtaagctgaaaacccctttcaagcttgagttctaccatcaagggatgtacttcgacacgccggtcatcatcaacgaggtcacggccaccgccgtcaaagagatcaaatacagcccggactttttcgactttggttccgtcaagcacgatcccgattcggtgaagaaactcggtttcgccgggtttaaagtgctctatccggtcaacagtgcggataagaacgacgaaatcatgagtatgctgggcgcgagctatttccgcgtagtgggtaaagggcaggtttatgggctttctgcgcgtgggctggctatcgataccgccttgccatctggcgaagagttcccgcgttttcgcgagttctggatcgaacgtcccaagcagggcgacaagcatctggtgatttatgccttgctggattctccacgtgctaccggcgcataccgttttgtggtttaccccggccgcgataccacggtagatgtccagtccaaagtgttcctgcgcgacaaggtgggcaagttgggtatggcaccgttaaccagcatgttcctgttcgggccgagccagccttcgccaacgctgaactaccgtccggcgctgcatgactccaacggtctgtcgatccatgccggtaacggcgagtggatctggcgtccgctgaacaatcctaagcacctgtcggtcagcacttacagcatcgaaaacccgaaaggttttggtctgttacagcgtggccgcgatttccgcgattatcaggatctggacgatcgttacgatctgcgtccaagcgcctgggttgaaccgcgcggcgattggggcaagggcaaggttgagctggtagagatcccaaccgcggatgaaaccaacgataacatcgtggcgttctggacgccggacgtattgcctgatgcaaaaacgccgttggcattgaactaccgcctgtacttcacccgcgacgaagagaaactgcattcacaggatatcggctacgtgggtaaaaccatgcgttcaaccggtgatgtgaagcagtcaaacctgatccgcgagccggacggcagcgtggcgttcctggttgacttcgtcggcccggcattgaaagcgctggatgccaatacgccggtagcttctcagatcagcattggtgacaacggcgaaatggtggaaaacagcgttcgctacaatccggtcaccaaaggttggcgtttgacggtgcgtttgaaagtgaaagacgacaaacaaccggtagaaatgcgtgctgcgttggtcaacggtgacaagaccttgacggaaacctggagctatcagctccctgccaatgaataagtctactgaaactgcccaggaatatcttgcggcaatgcccctgaccgatgagcggtcaggggtgctcaaacaacaagtaatggcaggcgataccccggcactggaggctttgcatcgtcagatgggaacctctgatgccaatgttgcgtctctgtctgcagatgacatcgccctggcctcggtcaaggcgcgtataagccaggcttggccggatgccgtcgatgacgacgattttgattgtgacccggaagggcgcaccatcctgaaagccacgccgccggtaaaacgtactaccatgttccccgaagcctggcgcaccaacccggtggggcgtttttgggatactctgctgggccgtaagacgcataatcgtcatgccagcaaagaagaagccgaggcggaaaaccgctggcgtattgtcggttcaatgcgccgttacgtgctgttaatcctgatgctggtgcaaaccggcatcgccacctggtacatgaaaaccatcctgccttatcagggctgggcgctgatcgatcctatcgccatgttggatcaggatctgatgcagtcgatgctgcaaatattaccttatcttttgcagaccggtattctgatcctgtttgccattctgttctgctgggtctcagccggtttctggacggcgctgatggggttcctgcaactgctgattggcaaagataaatacagcatctcttcgactatcaaaggcgatgagccgatcgatccagcgcaccgtaccgcgttgatcatgccgatctgtaacgaagacgttgaacgggtatttgccgggttgcgggcaacctacgagtcggtgaaggcgaccggtcagcttgagcatttcgatatctatgtgcttagcgacagttacgatcccgatatctgcgtcgctgaacagaaggcctggatggagctgtgccgcgatgttgaggggcatggacgtatcttctaccgccgtcgccgccgtcgtgtgaaacgtaaaagcggcaacatcgacgacttctgccgtcgttggggcggtgagtacagctacatggtgatcctggatgcggacagcgtgatgagcggcgagtgcctcaccggcctggtgcgcttgatggaagctaacccgaacgccggtatcatccagtctgcgccaaaagcctcgggtatggatacgttgtatgcccgtgtgcagcagttcgccacgcgcctttatggcccgctgttcaccgctggtctgcacttctggcaattgggcgaatcccattactggggtcataacgccatcatccgtgtgaaaccctttatcgagcactgtgctttagcgccgttgccgggtgagggctcgtttgccggttccatcctctcccatgactttgtggaagccgcattgatgcgtcgtgctggctggggcgtgtggattgcctacgatctgccgggcagttatgaagagttaccgcctaacctgttggacgagctgaaacgtgaccgccgctggtgtcatggtaacctgatgaacttccgcctgttcctggtaaaaggtatgcacccggtacaccgtgcggtgttcctgaccggggtaatgtcctacctgtcggcaccgttgtggtttatgttcctggcgctgtccaccgcgttgcagatagtgcatacgctggtggaaccgcaatacttcctgcaaccccggcagttgttcccggtgtggccacagtggaagccagaactggctattgcgctgttctccaccaccatggtactgctgtttttaccgaagttgctgagcatcgtgctggtctgggcgaaaggctcgaagcagtatggcgggccgatccggttgctgatttccatgctgatggaagtgatgttctcagtgctgttggcgccggtgcgcatgctgttccataccgtgtttgtggtcagcgcgttcctgggctgggaagtggtgtggaactcgccgcagcgtgatgatgatgacaccccttggggcgaagccttcaagcgtcacggttcgcaaatgctgctgggtctggtttggggcggcggtatggcattgctggatctgaacttcctgtggtggctgtcaccgatcgtcttctcgctgatcctgtcaccgtttgtttcggcgctgtcgagccgcgctacgctcggcctcaagagcaagcgagccaagctgttcctgatcccggaagagtacgatccgccgcgtgaactggttgccacagacacctatctgcaacttaatcgccagcgtgccttgcgcaacggctttatgcatgcggcggtggacccgtcctacaacgccttggctgccgcgctggcaacggctcgtcaccatctgcgtaccattatcgatcgggcgcgggaagagcgggtgaacgaggcgctggaagtcgggccagagaagttggcaaaagccaaacgccttgagctgttaagcgatcctgtggcgttgtcacgcctgcatcagcgtatttggctgctgccgcagggcgaagcctggcgcgagcattatcggcagttaccgcataatgaactggctcaccccgtcggccaacgctgacggttagcgtgaattacagggggaatgcgcgctgcgtgttcccctttttcgttgcaatctcaataaaggcttggttgttgaaaatggcttcactagtccgtctggcactgttggccgctatgacgacggcattatctggctgcggtagcattatcagccgcacggtacctggcgcaggccatgggcaccaatattatccaggggtgcagtgggatttgcgtgatactccctggcgcagtgttatggtgattgatgtaccgctctcgctggtggtggatacctttatgctgccgtttgatgcgcagcacgggccttacgaataggttttagcctctggttgcgaagaccaccaactgatagctttggctgttacagtggaaagaggtcaacgccgtcatccccagcccagcgacatgggcggccagcgaatgcgggttgtcctcactaacaaacagcgcgccaacgtcaaaatcctgctgagttcgcgctttcaccgcggcaaacaactggcgtagcacgccttttccccgccattcggcactcaggcataccgggccgtatagaaatacccgctgttgatccaacgcctggtcttgaaagcgttgcgtggccaacgtgtacagcatggcatccacgaccggcggtcggggttgggcgttggttggcatcaggcagacaaacccagccaactgctcatcctcaatggcgataagaatacccaggccgttattgatgcttgccagctgtttttcgttcatctgcgagacgataaaaccctgttgccgctgctgggcgttgaggttctctggggtgttttgcgcctgtagagccagaattgcgggataatcaccgggaaccgcttgcctgatgagcatgatacctgcctgtgttaaggggagaatgtagcagcatgcaatgtgtagccagggtcgtcaaggcgagggtgggcaaaccaggcgcccacccaacgggctcaacgttcatcccattcgtcggcagcgctctggccttcttcggtatccagcggcggatcgagctgaaaatccccttcttcccactcatgcagcgtattttcgttgatccactcggcgcggatctcaatctcgtcgtagtcaccgtcaaaaatggcctgggcggcagcgccgctgcgcatcgtcatgcattcgacagactcgccttcttcttcgaaaaactcggcctgccacatcgtgtcgccatccaacatgatgtatttttgcaggttaaactgttgaggtaccggcggctcatcatcgccgccttccgccgtttcgataaactcttcgcgagcggcttcgatcgcttcttccagcgtggcatacaggctcatgctcatctcctttttcaatcatcttggggggacaccagcattaattgttgtcgcatcgccgcaggatgcaaattttttgttgtccgttttgcgacgatagttgtccatcagccgggagacgcctggctacgggcaggaaataatggctacaccctttggtctgtaggagaatcaggatgttagccaacccagcaagcaagtaccggccattcccggccatcgatttacccgatcgtcagtggccggggcgcacccagcagcaggcaccgcgctggtgttccagcgatctgcgtgacggcaatcgggcgttggccgagccgatggataacgctcgcaagctacagttctatcaactgttactggcctgcgggttcaaggaaatcgaggtggcatttccttccgcatcgcaaaccgactttgatttcgtgcggcacttgatagagcaacggctgatcccggatgatgtctcaatccaggtgctgacgcagtcgcgtgacgatctgatcgaccgcacgatggagtcgttacaaggggctccacgtgccatagtgcatctgtataacgccaccgccccgatgtttcgcgatatcgttttcaagcaggacaaggccgctaccgtggcgctggcggtgaatggcgcacgccgtattcgccaatggtgcgatcggcatccggaaactgattggtgctttgagtattcgccagagaccttctgctttaccgagctggagtttgccctgcaaatctgtgaggcggtggcagacgtgtggcaacctgaacgccagcggcccatgattatcaacctgccggccaccgtggagatgagtaccccgaacatttatgccgaccagatcgaatggttctgtcgccacttcagccagcggaaacaggtgaccatcagcgtgcatccgcataacgatcgtggtaccggtgtcgcttgcgccgagttggccatgctggcgggggctgaccgagtggaaggctgcctgtttggcaacggcgaacgcacgggcaatgtcgatttggtgacgttagcgctcaatttgtacacccagggcatcgcgccagagctggacttcagccggttgaaagaagtggttgaagtggtggaacagtgcaaccagttaccggtgcatccgcgccatccttatgccggggagttggtgtttaccgcgttctcgggctcgcatcaggacgccatcaagaaaggtttcgccgcccagcagcagcgtgaagatgggttatggcaggtgccttatctgccgctcgacccggcagacgtgggatgcagctatgaggcggtgatccgcgttaacagccagtctggcaagagcggagcggcctggctgctggagcagaatcatggattgcgcttgccgcgtggcttgcagattgacttcagcaaagtggtgcaacaggccacggatgaaagcggcaaggaaatgacggtggcggagatctggcggctgttccgcaacagctacggattggtggaacagccgcgtttgcaactgcttagctatcaaacgcaaagccagggtggggcggcttacagctttacggcgcaggtagctctggcaggagaaccaatgcagctgcaaggtagcgggaacgggctgttgtccagcgcggtagatgctctctgccaacgctttggcctggtgctggctatcgacgactaccatgaacataccctgggccatcagagccatagccgggcagtaacctatatccgttgtacgccagcaaaaggggaggcaatttacggagttgggattgatgccgactcggccagcgcctcgctccaggctctgttcaacgtggctggccgctgtttgccgtgatcgcaggctgagcctgggcaaaataggtgctgggggaaacgccaagcaggcggcggaacatggcgctaaacgcgctggggctgtcataacccagatccaaagccacctccagcaccgaccttccggcagccagggcgttgagtgctgccagcaggcgggcacgacggacccagtcgctaaagcgtaggccagtctcacgttggaagcgacgggacagcgtacggccactgacgttgatgtgctgcgccgccagttccaactcccaaggctgtgccaaagattgctgaatgtgctggcacagggccaacaagacgccatcgcgtggctcgggcaggtgtagaggcaggatcggcagcatacgtaactcatcgaggatcagttccataatgcgctcttcgcgtccgccgggccgatagcctggctgaatatccatcgcgctgataatcagttcacgtaacaagggagaaatctgcacgacctggcactgagcaggcaaatcggcacgggccaggggatcgacgaacagtgtgcgtgctgctacgttaccgctaaaacgcaggttatgttccactttggccggtaaccagacgccacggcctgggggaacaacccagctgcctacacgcgtattcacctgtactacgccgctaaggccatggatcagttgggcgcagttatggcagtgatcaggttcgctatcaccatcctgatagtcctttgaaaatggcacgatagactgattttctgggagaaaatcgacgttaaacagcattgtttctcctctggagcctgatgacgtgtctgttgcagcatgccatgtcttgccgctaccgcaaagcgcatttcctgtacgccgttttgccatgaaacagcttaggctaactgtttgccaacgggaggaaatatggaacttgccaacgcggtattacgcattgcccggcccaccgaccatttggccgcgattgccaacatgtattgccagggcctggggtttgaacaactgggtgagtttgaagatcaccaggggttcgatggcattatgcttggtcatccgcgccatgcctatcatctggagttcactcatcaccgcggtgtactggtggggcgcgcacctacgcaagacaacctgttggtattttatgtgccggaggttgcaagttggcagagagggtgcgatcggctgatagccagtggctttaagcgcgtgcaggcatacaacccttattgggatgtgcatgggcaaacgtttgaagatttggatggctatcgcgtggtgttgcaagcacgtgcctggcaggcataaaaaaagccagcgaagaacgctggcttaaggctgaatactcagtatctatcaggcgtgcgtgaccggtttatcaccgcttttaccctgggtattttccagcatgcgacggatcgggacgatcagcaggataagcacggcggcacagatcaccagcgcaatagagcagcgggcgaacagggttggcagcatgtccaactgatccgctttcacgtggccaccgatcaagccggcagccaggttgcccagcgcgctggcacagaaccacaggcccatcatctggccacgcattctgtccggtgccagcagcgtcatggttgccaggccaatcgggctcaggcaaagctcacccagcgtcagcatcaggatgctgcccaccagccacatcggtgacacgccagcgccgccattgcccaacacctgttgcgcggccagcatcatcaggccaaaacctgcggcggcaaacagaataccgatcacgaatttggtgatgctgctcaggcggattttgttacgagccagagccggccaggcccaactgaagattggcgccaacaggataatgaacaatgcgttaatcgattggaaccataccgccgggatctcgaagtcgccgatcatgcggttggtgtaatcgttagcgaacaggttgaacgaggtcggtttctgttcgaaggccgaccagaagaaggcggcagaaatcagcaggataaaacagaccagcagacgcgcacgctctttgcggctcaggccagcaaagaagaacagatagataaagtacagcgtgaccgaggcggcgatgacgtaaaccagcatactggcaacggcgaccgggttaatcacgatgatgccttgggagatcataatcacgattgcggcaacgcccacggctagcgcaatcagccagccacccacgccatttttcttggcaatcgggctattccaggttgagtccaggcctacttcgctgtcatagcgcttcatggccggtacggcaaacacccggaagatcactaaagctaccaacatcccgataccaccgatgccgaagccccagtgccaaccgtgtgaacggatcagccagccggaaatcagcggggcaataaaggagcccatgttgatgcccatgtagaacagcgagaagccaccgtcacggcgcgcatcgcctttcttgtacagggttccaaccatcaccgaaatacaggttttgaacaggccggaaccgagcacgataaacatcaggccgacgaagaacaggtcgttgcccataatagcagacagggcaatcgacaggtggcccagagcgatcaggattgaaccgtaccaaacggctttttgctggccgagccagttatcggctaaccagccacccggcagtgccgccaggtacatactgccagcaaagataccgacgatcgccgaggcgttttcgcgcgccaaccccatcccgccgtcataaaccgtagcggccataaacaggatcagtaacggacgaatgccataaaacgagaagcgctcccacatctcagtgaagaacagggagccgagaggatatggatggccgaggaacgtccggctttctttctgattaacagaggattgcataaagtcttcccaatataatgtgctgcgcgctggcagcagatactgtggtatgtctgtgtctgtaagtgaggaaatcccgctgaggcggattacctgacaaaacctcagccgcagtgcctattaagcttgaaaaccctgcaggctattttattcacttggtcagaatgttacttctggcgtgatattatttaaccatttgataactgaatggtggttttgtctagtacctgtatcccattttttagacgaaaagtcgacaaacatctactttattggtttttatgttggctgtggtgttatttccattgacaggtggtttattgctctgtttgtgatttttttgtctaaaaacaaggtgttaataatattattcttagaggttggggccgggttacagcgggagggtaacaataataaaagtaagggaaatggggcttgggtaatatttatcacaacaactggcgataaatagcgctattactcttcttgtaacgtgtcttcacgcattctcgctggccgccgttgcagacaccaccaggaatagaacgcgttaaatagcaccaccagcgccgtcatgcagaataccgcgcggaatccgtagctggcagagacggctgcgccgagcagtgggccgctaacgttgccgatatcccggaaagattggttatagctgaatattcgcccggcaacctgattggtacagttgtagatcagtaaggtttgtaccgcaggcagcagtgcgccatcggcagcgccgagcaggaaacgcaatacgccgagttgccagggggtctggacaaaggccatagggatcagcaacagcacggaaatcaccagcataaacaccagaatccgctccgggccgatcctgtcgcccaacttgcccagccgtggcgcactcatcaaggcagcaacgccgggtaccgaggcgatcaaaccactgacaaacgccaggttgctgatgttgcccgccagttcacgcacgtaaagcgtgaggattggggcaatcgagccagtggcgatctggatgatcatggtggtgacaaacaggctgaggatcagcttggggcttttgagcgaggcaaagacttggcgcgcatgcaacatgtcttttttctgcaccggagtgaactgttcccgcacgcagaacagcgtcagcaggaaacagataaacagcaccgtagcggtgatgaagaacacggggcgcaggccatattggtcagccagcaaaccgccaatcaatgggccaatcagggcaccactgacgccgccggtcgatagggtgcccagtgcccagccgctgcgatggcgcggcacctgggtagcaatcagcgcattggcgttgggaataaagccgccgagcagccctagcaccgcgcgcagtgccagaaactgccagatgttttgcgccatgcccatcagcatcatcacaatgcccattcctagcgcagaacgcagcaacatcagcttacgcccacggcgatcggccaggctgccccagaacggtgaggcaatggcggagaacaggaaggtgatactgaacaccaatccggaccacatattcagcgactgatggccggtaacgccaagagcttcaacgtacagcggcaggaacggcatgatcaggctaaaggccgcaccggtcagaaagcagcccagccaggtgatgaacaggttacgttgccaattgataggttctgctgccggggccataggtttccgtgcgggataggggagcctggcgatcgcgcaaggcaaaaaaaagttagcttggtaagtatgcgcttaataacgcaggttatcaattgagcaactgtgtgattttgagtaaaaatgaaataaagttttaaaacggggaatgacaattattcccgcgcagaataacgcgggaacgggggctcaggcgccgaccaaggcttcgaatccggcgctggtggtagtgagggcgacgtttgtcacctcataattggccacggcgatgaagggatcttccgccaggatggcatccagcgtggaacgttccatatcttttaccaggatcacgccgccggtacgcggattctttcggccagaggcaataaagctgccagcttgaaaatagcgcttcaaccaggcgatatgcccttcaagatggctttctacttcttcaatcgggcggtggtaggtcaggctgacgatatacatagaagctcctgttgctggaaaagtgacaatatcatgtgggccatcctggcccgtggtgattaatagagagagggctcaccttctgggcgggtcttgaagcggcggtgcagccacatatattgatccggtgccatcaggatctctttttctaccactttgttcataaaggccgcagcctcgacttcgttatccagcgggaagttctccaccgctggctgcatgatgagttcgtaccctttcccttctggcaggcggcgaggcgtaaagggaatgatcgccggtttccccatgcgcaccaacacatagctgcctgtggtggtcgctgctttttccactgcaaacagcggagcaaacacgctgctgcgcgggccgtagtcatgatccggtgcgtaccagatgatctctccttgtttcagggcgcggatcatccctttgacgtctttacgatccagcatggatttgtttgaacgcatacggccccaggtctgtagccaatccatcagcttgttgtcgtgtggacggtagacgcctatccctggattgtggataccgaagatgcgcgcacccaactccagagtcaggaagtgcaggccgatcagtagcactccttgatgattgtcccgtgccttttgaatgtgctccagaccgctgacgctgaaccagcgctcaatgcgccagttgggccagaaccaggccatgccggtttcaaacagccccatccccacggattcgaagttcttgactatcaacgcatcacgttcggctcttggcatatccggaaagcacagttccaggttacgctcggttatcgctcgccggcgtttgaggaaacgcattgaaaagcgacccaacccggtccccaaacgataaatcattgggtatggcaacaggaccagcaggtagagtaaggcaatgccaaaccaggtaagccagtagcgcggatgcagtaaagatcgattgaaagaaggaacttgcgtcatgggttctcagcttagaagcagtcatttaacagtaataacagataaaatgcatagatacgtcgagttggcggtcgccagcagcacttttggtgacaacgggttgctagaacgactcagtctatgcgatggttttctgccgcttataatagcgtattgtggcatttttcttttgtaacaggaaaactcaccgcattaaaacaccctttttgggccaaaatcaggcgtgggcgctggttttttcgccaaatccagtgaggatcgacctataaatcagacggcgttttatgcgttcattgattcaggaggtaactatgtttgcatcatggttaagtgctggactgctggtgatgggggggctgcttggttgcctaggggcatatttgcagtacaaccctttgctggccgtagcgggaaccggactgctgtctggggcgattatctctggggctacggaatggtcaagcgggcgctaaacacccgcttgaggtcgttttaatggtctttgaacaaaccttttacccgatgcggttctgagcgccaatactgtggcggagcctgcacttgggcccccagttttgcggccgcgtgccatggccaacgagggttatagagaataccgcgcgctagcgcgaccatatcggcctgaccggtggcgacgatcgcttccgcttgctctggttcggtgatcaaccccacggcgatggttggcatccccactttatgtttgatggtttcggcaaatggcacctgatagttcggccccaccgggattttttgctgtggtgacaggccgccgctggaaatatgaatgtaatcgcagcccaactcctttaaagcgctggccagttcaacagattgttgttcgtcccagcctccttcaacccagtcactggcggagatcctcacgccaagcgctttgttggccgggaataccgcccgcacctcgctaaaaatctccagcaacaatcgcatacgattttgcaggcacccaccatattgatcggtgcgatgattggccagtggcgaaaggaactggtgcaacaggtaaccatgtgccccgtgcagttcgatcagctcgaagccgagacggtcggcacgccgtgccgctgcaacaaactgtgccttcagctgctcaatttgctccaggctcatagcctgtggagtctcatccagagggttaaagggctgggtagaggcagagagcgtttgccaaccaccctcactcctggtcagttgggcaccgccatgccagggaagggcgcaagaagctttgcggccagcatgccccagttggatccccaaaggcatggtggcgtgtttttttaccgcctgcaccacgtcggcaagtgcctgttcggtatcgtcgtcccacaggcccagatctcccggagaaatacgtccttccggtgaaaccgcagtggcttccacaatcagcaaacctgccccggaaagggacagatggccgaggtgcatcgtatgccattcggtggctttgccgttgtcggcagagtactggcacatgggggcgataatgatgcggttaggcaaccgcagtagccccagggtgatcggagtaaacagctggctcataatttcctcatggtccgtcaaaattcgttgctacaacttgcactaggcttatcggtatttgccaataacgtcaagctttgtgcggaaatgattgccgccgggttaatgctgtgttgcagcctattttcgggtatgatgtgcgccgcgcgcgggctaacggcccgtgggcactcaatcagtcacctcccgaaagacaggaaagtacaccatgccagtgttacataaccgaatttctaatgaggaactgaaggcgcgtatgctggccgaaaccgagccacgcaccacagtttctttttataaatatttcaccattgacgacccaaaggcatttcgcgatagcctgtatattcagttcgataaactgaaggtgtttggccgtatctacgtggccaaagagggcatcaatgcgcagatcagcgtgccacagagtcattttgacgcgttcaaaaccgtgctgtttgcttcgcacccggcgctggatcaagtgcgcctgaatattgcgctggaagacgacggcaaatccttctgggtactgcgcctgaaagtgcgtgaacgtattgtggccgacgggattgaagatgaaaccttcaatcctgccaatgtgggtgagtatctgcaggccgatcgtgttaaccagatgatcgacgatccgaatacggtgtttgttgatatgcgcaaccattatgagtacgaggttgggcactttgagaaggcgatcgaagtgccttccgacacgttccgcgatcagctaccgatggcagtggaaatgctacaggagcagaaagacaagaatattgtcatgtactgtaccggtgggatccgttgtgagaaagccagcgcctatatgctgcataatggcttcaaaaacgtctatcacgtggaaggcggtattatcgaatatgcccgccaggcgaaggcgcaagggttgccattgaagttcatcggcaagaactttgtgtttgacgagcgcatgggggaacgtatctcagaggacgtgattgccaactgccatcagtgcggtgcgccatgtgatactcacaccaactgcctgaacgacggctgccatctgctgtttatccagtgcccaagctgtgccgagaagtttgctggctgttgcagcgagacctgccgtgaagaactgaaactaccgcgtgaagaacagcgagcccgccgggctggccgcgagaatggcgtaaaaatcttcaataagtccaaagggctgttgcaaaccaccatgcatatcccagaaccgaaagagtagggtgttgctcataggatagaaatagggcgctgaaattcagcgcccttgttgtataaagaatgtattacttctcgcgaacgccttcgaccgagatgatcagctcaacttcctgagaggctgggccgaggtcggtggtgatgccaaagtctttcagcttgattttaccgttggcttcgaaaccggcgcggtaaccgccccaaggatccttaccttcgccgaccagcttggctgccagcgtgactggcttggtcacgccattcaacgttaggttgccgactacggcataaccttcaccgtcttttttcacctcagtagaggtaaaggtggcctgcttgttcttttcaacgttcaagaactcggcgctgcgcaggtgtttgtcacgctcggcgtggttggtgtctacgctggcggtgttgatggttacgttgactttatcgttagccgggtctttttcatcgaaggtaaagccaccgtcaaaatctttgaaagaaccataaatccagctgtaacccaggtgctggatgcggaattcgataaaggcgtgctggccttgtttgtcgattttataattggcagccagggcggaaccggcgtttaacagcagagcgcccgcggccaggcctaatacggttttcttcaacatagcaatatctccataaatccaaagggttaatcggtgctgcgacccagcatccgtttcaaagtaacatcaccatcaataaagtgatgtttaagcgcagcaagggcgtgcagtaccgaaagtacgacgacggcccaagccagataaagatggatagtcccggcggtatcggcctgctgtggcaaaccggtcacgctggccggtacgtcaaaccagccaaatacgctgattgcctgaccgtcggcggtcgagatcaggtagccactgatcaggatggcgaatagcacggtgtaaagcgcgatatgggcgagtaccgcactgatatgcgtaagacggctataactggccaggggcttgggcggcggcgagataaagcgccaaaccactcgtaccaccattacgataaacagcagcgtgccaatacttttgtggatctccggcgcctggtgataccaaacgtcgtagtaacccagcgtcaccatccataatccgagggcaaacatgccgtaaacggtcagtgccaccagccagtggatcagcacagaaacgtgaccaaagcggtcggcggtatttttccagagcatcagttttccttacaaatctcatttaccgacagcaatacttaaactttaagaaatataaatcaataataaatttaactaagttactgcataaaaatattaatcagtagatttgtttgagttgtggcgagttggtcaaaggaatcgttggagagggcgcttttctggcaatgctggagaaactctggccaattgaaatctatcgactttattcttaattgtcagcttttgtcatttttcgtaaataccaccagaaaccttggcaaataattgaaaaacgactagcgccgattatttgttcgccttatctaccaggattaatttaattccttcagcaacttgagggtaatatgcctgcgacagcaaggaataatttgctaacatgtatttatcgacggctctggcgggcctgtatcacacaaggaaatttcatgggcatacccgagtttaatgaccgcaagttacgtctgatcatgatgctggccatgctggtggtgatcctggctggcataaaggcggcggcagatattgtggtgccattcctgctggcggtgttcttggccatcgtgttaaacccgctggtgctgctactggaacgctttcgtgtgcctagagcgctgggggtgacgctattggtgattgccatcgtcgtgctgttgctgaccttgatcggtatgctgggtgcttcattaaatgagtttgctcgctcattgccgcagtatcggggcgtgatgctggagaagctgagtgaactgcaataccaggcgcagcgcttcaatctggatattaacttctcggcagaagcggtggtcaaatacgtcgatcctggtgccaccatgaacctggtgacccgcctgctggggcacctttccggggcgatgaccagcatcttcctgttattgatgacggtagtctttatgctgtttgaggtgaaggtattgccctttaagctgcagcaggcgctggataatcccaccgaagggatggccactatccgccgggccttgcaaggggttacacactatctggtgatcaagaccgccatcagcctggcaactggcctgatcgtctggggctttctgagctgggttggcgttcgttttgcctttatctggggcatgatggcgttcatgttcaactatgtgcccaatattggttcgatcattgccgctattccgccgctgatccaggctttgctgtttaacggctttgccgatgcggccgtggtggctgcgggctatattctgatcaacctgatcatcggtaatatgctggaaccacggatcatgggccgtgggctggggctttctacgctggtggtgttcctttccctgatcttctggggctggctgatggggcccgtggggatgctgctttcggtccccttgaccattatcgcgcgcatcacgttggaaaccatggatggaggacgcaaggtggcaatgctcctcggtgatgggcgcgagataaacgaaattacgccgaaatgaggcttaaacgacggcctgcagtgctaacgaagccgaacccacctgtttaaaggtggtgggttctggcggatagaaatagcgcagtatgttatacagtgaataaaattccagccggttacgcacgttgattttctcggtgatatggcgcttgtgcacgtacaccgtatgggagctgatctgtaatttcttggcgatgcggtaattcggcatttcggacatccaatagcgcattaccgtcaattcttgcgggctgaaaagcgaatgagcctcttgatctttcattagctcactggggattttacttagcgtttttagcgcaatgggtaacacggctttgttgaataaaaaagtattgctggcgatgcgcagcgggctttcactatagggataaggagcatcaaggtaaatatgtaccgttgcacgccaggccgccgtgataaacgctgaaagcagttgattatctgttgtacagcggcagtagttggttagattcaccaaaatatggctgggtttgaaactggccagtagagggagcgcggtgtcgatgtctgggcagcattttactgacgcaaacacgttgtcagtaaagtggctggcgatcccaatacgagtgaaacagcattcgtctacaacgagtagtttcatggtgacgtccttgttgaagatacaaaacgggctagagcctaattatgtaaaataggccttacccggcagtaggatcaattcggaaatccagtggctataggaagatatttccgtccatagcctatttttcagtaatatcagtatgttgtcgtatttctatcgctgtggttttcccctgccgctggccagagcggtgcgaacaggggattgatcggtcagaaacgccgcaggctgaagggggtgatatccagggatgaaggcttatcttgcgcaaacagcgctgctatctcgcccagtacactggcaaacttaaagccgtggccactcaggccggtgatcaccatcaactgttggcagtcaggcagggtgtcgatgataaagtcttcatccgggctcatatcatagctacaggcctcaccgtgtagacaaacgccaagcccaggcaagaagtggcgcagaaagccgaatacttcggtaccgtcgctggccagggagccgaacggcttacgctgatctgctgtctccatcggttgtccaccctcatgtttaccgacctttaagccgtcattctccgatgggaaaccgtaatagtggcagccgtcttgcgcttcaacggtgaacgccggaaagcggttgttttcgttgtaacggccatcggcctgataccaggaaaacaccttacgtaccggtgaaacaggaagctgtggtaacagatttttgacccaggtacctgcgcagaccacggctttacgcccttggtagcgcccttctgaagtaacgacctcaaccccttgctcgattggctctatcgcggtcaccgggcaattaaacagttgggcgcagcccgcttctctggccaatctgatatagctggcgacaatcagctcagaacgcagtattcctgcatccggttcgaacaggccgacataacccgctggcgcagtgaactcttgccagcgctgttggatctgttcggcgctcagtaactgtgtattgaggttaaagcttttggcactgcgctgtgccgtggtgacaaactcactgttttgtggccccagagtgagtacgccacagggatgaaacagcttgtcgccgcttttctgttccaatccgttccacagtgcttgggcacgcagcagaaaaggcacatatttttcgccttctccgtaagcatggcggatgatgcgggtatcgccgtggtgactgccctgacgatgcggggggaaagcgctgtcgatcattaagaccttaaggcctgcggttgtcgcataatagcctgcagcagccccaaccgagccgctacccacgatgatcaagtcatattccacgtgccatgtcctttctttgatgtgtcgctgatggccgttatgataaaagtttggcggcggtaatgcaccatgaaccgatgcgagccgatacaaaagaaaaggcgccggttaattgccgacgccttagcggttgagggtgaatgggttaatgttttcttcgatcaaggtctaaataatccgtagattctatcttggcgatgccagcttctaaaatattgatcaattggcgggcaacgtctgtggttagccaaagagtccgatccacttgcgcttcttcggctgtttggtctagtgaagacaggtaatgaaggcgaatcatcatggcatcataaacatcgacggtactgatatcccagccaacaagcggatgtgtctgtattacttcatcatttctgtccataaagaccccttatcaagtagtgactagctggagttactaacgaggatcaatgcgtctcatcttcatggtgagcttttacagtatacgcatccgggatctgacgtggggtgttttcctgcggtttattgcaaataaatattttttgcgcaattaatcggcaaatggtaggggcgctgaatgctgcgcccgttcaaatattactcttcggatgcgggaggaagttgcacgtgcgcatggctttccaattcggctgccagatgagcgaaatgcttttgcatctcaggatcgcggttctgattttgtgcttccagtttcaggctgtggatcagcaactgattggttttgtcattcaagccaaaagacaaataagagaaagcgacctcgagcacgttcagccgccgtttttgatcggcgatcagggccagcaactcgccaaaggtcatcgcttcttcgggtttgtctttatccggaaccattgtttacacctttgttgcactataagtcgtctaatcattacagaccacaagtgctgtttgttccaggggaaagggcaatacggcggaaacaaaaaagccggagagcgacccccggcaacaacgacattgcagaattattctgcactgaaccaatcgtcggcactttcccaggtttcctggagtatctcctcgatcaggtctttatctgttttggcaccgcccattacggaaaggccattggcaccggcataacggatctggacggtagtgtcaggaaactggcgattgacccgtttactgaattcgccggtcagggcttcgatagcccccggcggcagtggtttggttttatctatagtgacttcaacacgcataattgcccccggaactgtatactggatatttatacagtcaaatgacaccggaggcaagagcagaaataaaatatttagcagtcggtcactgaccagttgatggtctcacccgccaggaagggcaccacggcttcattacccagagttatctcctctggctgggccaccggtaggcgttgcagcgtgataaagtcctggttcaccggcaagccgtagaagcgtgggccattcagcgagctgaaggcttccagatgctcaagcgcgtctaattgctcaaacacggtggcgtaggcgggcatcgcgttaggggcgttaaatacccctgcacagccacagctggtctctttacggtgtttggcatgaggtgccgagtcggtgcctaggaagaagcggtcacaaccgctggcaacggcgctgcgtaacgcttcctgatggatgttacgtttgaggatcggcaggcagaacaggtgtggacggatcccaccgaccagcatgtggttgcggttaaacatcaggtgctgtggcgtaatggtggcaccaaggaaacgattgccttcctgcacgtactgagcggcttcccgggtggtgatatgctcgaatacgattttcaattccgggaactggcggcgcaccggctccatcacctgttcgataaagcgagcctcgcgatcgaagatatccacgctggcatcggtgacttctccatggatcagcagcggcataccgatcttctgcatctgctcaagcaggggataaattccggtcacatcgctcacgccgtggctggagttggtagtggcattggctggatagagtttggcggcggtgaacaccccttgctcaaacccgttgaccagctccgcagcagccagtgaatccgtcaagtagcaggtcatcaatggcgtgaagttatgttccggcgggagggctgccagaatgcgttcacgatagctacgtgctgcggcaacggtggtgatcggtggggccaggttcggcatcacaatcgcccggccaaacacctgactggtatagggcagaaccgttttcagcatgttgtcgtcacgcaaatggatatgccagtcgtcagggcggcggattttcagggcttggggttgtgcggtcatggtgcagagctccggcggtcaaaaaatcttagtaaaagcgaataattttgggttattcacgccggggtgaaaggataagcggaaaacgttccggatgcatctgttagttaatggcaaattgaaatcagtaggctgcgagagcttgggtaaccgggaagcactgattatctcaggccagacctggggagggggcatcttctggaaaggggtaaaaaaacccgccatttaggcgggttttgtagggcagggattaacttagtcgttaactggctgcggtttggtcgctggagcagtggcctgattagccgctgcatggccgccagcagaaccttttccgtcaaagttgaaggaagggcgctgccactcgctggtcttggtggcttccggctgataatccggcgcaggcgctttggtcatcggggcggtagcgatatgcttgtagagcgccggttgcggttgtgcaaccactggggccgcctgcacaggagctggagcagcctctggctgtgctgacacgacttccggctctgcggctacagcagtttctgcaggggcagccacaacggcttccactacaacttcttcaactaccgcttcttcaactacaggctcttgcaccaaggattcagtgataaccggctcagcttgtactgcagcatctgtaaccgtctcatcttcagttgtttcactgacaacggtttcatctaccacaacagcggctgattcggcagcgacggcttcggtttcaacaggtgcagtttctaccggggcttcaactaccggtgttgccaccgattcagccactaccgaagcggtgtcaactacgcttggcgcttcgttgaccacaggctgaacaggagcggcttcaacagccaccggtgcagcagccacggctacggtttcaattgccactggcgcttgagcttcttcgtgttcaacgtagacggctgcttgtgccacaggatagctgacccaaaccttgcctgaagccatctctggtgaggcaaacgccccggccaacggcattggcgactggttcggataacgctcgtcacgatagcgacgacgacgctgaccactgacgcgcagatggcgtggagaacgacgagagcgacgtggcatgccgttttcaccgttaccacggttgtcagcttgcgtgtcatcttcagcctgggccgcaatggcctgtggcaacagtttaacgctctcagccaataccggagcctggcgttcttcaaccttggcaaccggtgccttaggcgctaacagctcttcagcggcgcgatgcagttcttcttccgccgacaggacgcgaactttctgcgcgagtggacggcgttgacgacgttgcgttggctgctgatgacggtcttcatcttcgtcattgctattgctggcaacaacgacttccgcagtttccggcactttgacgtcttgtggagcctggcgtttttcttcctgacgacggcgttgacgctcggctcgttgttcacggcgctgttgctgatcttcgcgctgtgccttggccgcttcttcagtctgcacttcggtgttggcagccgctggtgcagtctgttgttgtgcgttacggcggttgttgcggcgctgatcgtcacggctttcacgcggttcgcgcggttcgcgattttcgcgtggttcacgatcaccacgttcacggttgtcacgcccttcgccacgttctttacgctcgccacgttcacctttacggccagagccttggcggcgttgacctcgacgatcctgacgacggttatcgctgtcttccgttttggcggtttcgaccggtttagcttcaaccaccggcgtttcttcaccggcgaacagtgacttcaagccaccgaacagacggctcaacaggccaggtttggcctcagcagcgggggttgatgcaactgccggtttggcggcaacggcaggcttgctaaccacaggctcttcttcctgcggtggagcatcctgtgacagggagaaggaagccagagccggttgctcgcgtttgcgctcgactggcgcatcatcctgcggctgggccatttcttcttcatgcagcttcggcagcaggtagctcagggtcggtgtttcttcacccttgcgtacgcgcagcacggagtaatgcggagtttgcatctgatcgtttggcacgatgatcgctttcacgccaccctggcgcttctcgatcgcgctgacagaatcacgtttttcgttcagcaggtaggaagcaacctgaaccggtacgatggcgtgaacttctttggtgttctctttcagcgcttcttcttcgatcaggcgcagaatagacagcgccagcgattcgttatcacggatggtgccggtaccggtacagcgcgggcacacgtggtggctggactcacccagtgacgggctgaggcgctgacgggacatttccagcaggccaaagcgcgagatacggccaatctgaatgcgggcacgatcctggcggacggcatcgcgcagacggttttccacttcacgctggtgacgaaccggggtcatatcgataaagtcgataacgatcaggccacccaggtcgcgcaggcgtaattggcgagcaatttcatctgcggcttccaggttggtattgaatgcggtttcttcgatgtcgccaccgcgggttgcacgcgcggagttgatgtcgatagcggtcaaggcttcggtggtgtcgatcacgatggaaccaccggaaggcagacgcacttcacgttggaacgcagattcgatctgcgattcgatctggtaatggctgaacagcgggatttcgccactgtacaatttgatcttgctgctgaaatccgggcggcccaaggcagcgatgtgctctttggccagatcgagtaccttcgggttgtcgatcaggatttcgccgatgtccgggcgcaggtagtcgcggaatgctcgcacgataacgttgctttcctggtggatcaggaatggagcagggcggccttcggcggcttttttaatcgcttcccagtgcttgaggcggaatgacagatcccattgcagagcgtcggcagatttgcctacgccagcggtgcggacaatcaatcccatgccgtctggcaattgcagcgaggagagcgcttctttcagttcggtacggtcgtcaccttcgatgcggcgagaaataccaccggcacgcggattgttcggcatcagaaccagatagctaccggccaggctgatgaaggtagtcaaggcagcgcctttattaccccgttcttctttatcaacctgaacgatgacttcctggccttcacgcagcacatctttgatgtttgggcgaccatgggaagagtaattgcttgggaagtattcgcgagcgatttcttttagcgggaggaaaccatgtctttcagcgccgtaatcaacgaacgcggcctctagactaggttcaatacgagtgattttacctttgtaaatattcgcttttttctgctcatggccagggctttcaatatccagatcgtacagccgctgtccatctacaagggcaacacgcaactcttcctgctgagttgcgttaatcaacattcttttcatcttaacttactcgttttttttacattatcgacaaagctgcgggcaaaataacctcatggccaggttaaaaccgaaaaccccgtgtcttctcgcaaagccgtcaacctcacggttgtcgcctgcataggggcgcattatctcggtaagcctgtatttctttgtgaaacacagcgcttttgactcagggaatagcctctgatttatgatgacagatctgattccatttgccggccaagctgcaacccgcagcccgctaattgtttgatttcacattacgtcttacgccattgctgcgtttttgtgcaaccagacaaactgtataattccgcaattctcctcgtttcaaggggatcggcacggaaagttacagcattattccattgcaagcacctttatagcaaggtgacttttccttaactatgatcgaaaccgcaaacgatcaacctggcttgctgccttattgttcgctggcgtttctttcacagtctgagagacagttaagcacataaaaagaggtggcgctattgacgcgctctatttagaatcccgccccatgaaaacgaacattcccgcagtacaattagtgacgatttctgacgacgaagccggtcagagaatcgacaatttcttgcttgcccgcctgaaaggcgtgccgaagagcatgatttatcgcatcgtgcgcaagggcgaggtgcgggtcaataaaggccgcatcaaggctgaatataaactggcagcgggcgacgtggtgcgcattcctccggttcgggtcgccgagcgtgaagatgcaccggtttccgccaagctggataaagttgcagccctggcggattgtatcctttatgaggacgatcacctgctactgctgaacaaaccttcgggaacggcggtgcacggcggtagcggcctgagttttggggtgatcgaaggattgcgtgcattacgcccggaagcacgttttctggagctggtgcaccgcttggatcgcgatacctccggcgtgttgatggtggccaagaagcgttcggcgctgcgttcgctgcacgagcagttgcgcctcaaggggatgcagaaggattatatggcgttggtgcgcggcgagtggcagtcgcactgcaaagcggtgcaggcaccgttgctgaagaatattttgcagagcggtgagcgcattgtccgcgtcaacagcgaaggcaaaccttcggagacccgcttcaagatcgaagagcgctttgaacatgccacgttggtgaaggccagtccgatcaccgggcgtacccaccagattcgcgtgcataccttgcatgccgggcatccgatcgcctttgacgaccgttatggtgaccgggagttcgatcgccaattggcgggcaccggcctgaagcgcctgttcctgcatgcggcggcgctgcgctttgaacatcctgccaccggcgaaacgatgcgcatcgaagcgccgatggatgacgaactacgtcattgcctgcaggtattgcggaaaagaaccgccgctgccaagaaataagcttataccagcgggttgatcccttcagcccgcaacatctccagcaatgcgatcagcggcaggccaatcagcgcattcgggtcgcggccctccagtttttcaaatagcgcaatccccaaaccttcactcttgaagctgccagcacaaaagagcggctgctcgaggcgcacgtaggtttcgatctccacttcgctcaacgtacggaaatgaacgtggaaaggctcacacatcacctgtaggcgttggctagggctattatagagcgccaaaccggtatagaaggtcacctgcttgccgctggccttgcgtaactgctggcgggcgttctcttcgctatggggcttaccggtgatttctccggcaatcacgcagacctgatcggaaccgataatcagataatcagggtaggctatagccagcgcctgagccttggccgccgccaggcgcagtaccaaagcctcggcactttccccgggcagcggtgtttcatcggtttgcggcgctgcacaaataaagggcaggtgcagcttctccaacaactgctggcggtagattgacgttgaggcgagtaagagtctttgcataattttttccacaaaccgtagcgtaaatatgtcgctcatcttaaactgtcggccgctctggaagcgaatattggtgaaaggtgccgttttagggcctttttctttgactctatgacgttacaaagttaatatgcgcgccctatgcaaaaggtaaaattacccttgaccattgatgcggtacgtaccgctcagaaacgcctggactatgttggttcctatgcgcctgagctggttacacgtgttgccgactccgtggtcagtgtggacagtgatgtcgaagtgcagttgtcgtttgatattgataaccagcgcctcgcggtgataacagggcatgcggacgtcgcggtaacgctgatgtgtcaacgctgtggtgtcccgtttgcacatcaggtccacacaacatattgttttagcccggtcgtcaatgatgagcaggctgaggcattaccggaagcgtacgaaccgatcgaagttgacgagtttggcgaagtcgatctgttggcaatgattgaagatgaaattattctttcactgcctgtcgttccggtacatgaatctgaacactgtgaagtgtccgaagcggacatggtgtttggcaaactgcctcctgaggcggagaaaccaaatccatttgccgtattagccagtttaaagcgtaagtaatcgaggagtaaggtccatggccgtacaacaaaataaaccaacccgttccaaacgtggcatgcgtcgttcacacgatgccctgaccaccaccaccttgtctgtagatgcgacttccggtgaaactcatcgtcgtcaccacatcactgccgacggtttctaccgcggtcgcaaggttatcggctaagtcagcgatactttgactcgtctaaccctggcgttagatgcaatgggcggggatttcggtccctgcgtcacagtgcctgcttcattgcaggcactggcctctaatttacagcttcatctcctgttagtcggcgatcccgacgtcatctccccgttacttgccaaagccgatccgtctgtcctggaacgcttgcaagtcgtacctgccgaatcggttattgccggtgacgccaagccttcacaagcgatccgggccagccgaggtacctctatgcgtattgcgctggagttgattaaaagcggtgaggcgcaggcttgtgtcagtgcagggaataccggggcgttgatggggctggccaagctgctgatcaaaccgttggacggcattgaacgcccggcgttgatgaccgtgatacctaaccagcagcgcggtaaaaccgtggtgttggatctgggagccaacgtagagtgcgacagcacgatgctagtgcagttcgcggtcatgggtgccgtgatggcggaagaggtattgggtatcgcgcagccacgtgtggcactgctcaatatcggcgaagaagaaaccaaagggctggataatatccgcgaagcctccgccgtacttaaaaaaactcaggcaatcaactatattggttatctggaaggcaacgacctgctcactggcaaaaccgatgtgatggtctgcgacggcttcgtcggcaacgtcactctgaaaaccatggaaggtgtgataagactgttcttgtcgctactcaagtcatcctccgaaggggggaagcaggcgtggtggttaaaattgttgggtcgttggttacaaaaaagggtggcaaggcgttttggtcatctgaaccccgaccagtataatggtgcatgtctgttaggattgcgggggaccgtgatcaagagccacggcgccgcgaaccaaaacgcgtttgcggtggcaatcgaacaggctgtacaggcggtgcagcggcaagttccggaccggattgctgcgcgccttgaagctgtattacccaagagtgactgatcgttcatgtatacaaagattctcggtacggggagttacttacccgcacaagtgcgcaccaacgctgacttagaaaaaatggtggatacgtctgacgagtggatcgtgactcgcaccggtattcgtgaacgtcgtatcgctgccccggatgaaaccgtggcaaccatgagcttccatgctgcgtctcacgcgctggaaatggcgggtgtggctaaagaagatatcggcctgatcgtggtggcgaccaccacctcgagccatgcgttcccaagttctgcctgccaggtgcagcagatgctgggtattcaggactgcgcggcgtttgatatcgcggcggcctgtgctggctttacctatgccttgagcgttgccgatcagtacgtgaagaacggcgcggtaaaacatgcgctggtgatcggctccgatgtgttgtcacgcacgctcgatccagaggatcgcggcaccatcatcctgtttggtgatggtgcgggcgcggtagtgctgggagcgtctgaggagccgggcattatctctacccatctgcatgccgatggtcgctacggcaatctgctggcgctgccgaataaagatcgtcagaacccggatcaacctgcttatgtcaccatggcgggtaacgaagtctttaaagtggcagtcaccgaactggcacatatcgttgatgaaacgctgaaggccaacgatcttgaccgcagcgaactggattggctggttccgcatcaggccaacctgcgcatcatcagcgcaacggcaaaaaaactgggtatggggatggataaagtggtggtgacgctcgatcgtcacggtaacacctctgccgcctcggtacctgcggcgctcgacgaagccgtacgcgacgggcgcatccagcgtggtcagctggtgttgctagaagcattcggcggtggctttacctggggctcggcgctggttcgtttttgattcaacaggaataaaaaaatgacgcaaactgcttttgtttttccaggccagggttcacaaaccgttggcatgttggccgatttggccgcacagtttcccattgtggaacaaacttttagcgacgcttctgcggctttgggttacgatctgtggcagttggtacagaccggcccggcagaagagctgaataaaacctggcagacacagccagcgttgttggcggcctccgttgccatcttccgtgtctggcaacagcagggcggtaacatgcctgtgatgatggccggccacagcctgggtgaatactcggcgctggtgtgtgccggtgtgctggattttgctgcggctatccgtttggtagagctgcgtggcaaactgatgcaggaagcggtaccggaaggtaccggtgccatgtacgccatcatcggtctggataatgactcgattgccaaagcctgcgaggagtcagctcaaggccaggtagtttcaccggtgaacttcaactctccggggcaggtcgttatcgcgggcaacaaagaagcggttgagcgtgcaggtgcagcttgcaaggcggcgggagccaaacgtgcactgccgttgccggtgagcgtgccttcgcactgcgcactgatgaagccggctgccgataagctggctgtagcgctgcaagacatcaccttcaatgcgccgttagtaccggtagtcaataacgttgatgtacgcgcagaaaccgcgccagaagccatccgcagtgcgttggttcgccaactgtacagcccggtgcgctggacggaaagcgtagaatttatggcggcagagggtgtgactctgctgttggaagtgggcccaggcaaagtgctgaccggcctgaccaaacgcattgtcgacactttgacggcggcagcggttaacgatactgccagcctgtctgcggcgttggaacagtaaaagaggataaccatgagcttcgaagggaaaattgtcctggtcaccggcgcaagccgcggtattggccgggctattgcagagttgtttgttgcacgtggcgccaaggttatcggcactgctaccagcgagagcggtgctgaagccatcagcagctatctgggtgagaacggcaaaggctatatgctgaacgtggttgatgctcaatctatcgacaacgttttgacctcgattcgcgcagaatttggcgaaatcgacattttagtgaataatgccgggattacgcgtgataacctgctgatgcgaatgaaggatgatgagtggcaggatatcctggacactaatctgacttccgtattccgtctgtcaaaagcggtaatgcgagctatgatgaaaaagcggtttggccgtatcatctctatcggttccgttgttggcaccatggggaatgcagggcaggctaactacgcggcggctaaagccggtctgattggttttagtaagtctttggcacgtgagatcgcttcacgtggcattacggtcaacgtcgtggctcctggctttattgagacggacatgacacgggcgttgacagaagatcaacgcgcaggcattttgactcaggttccggctagccggcttggggaagctaaagaaatcgccagcgctgttgcatttttagcctctgacgaggccagctacatcaccggtgaaacgttacatgtcaatggcggcatgtatatgatttaaaaaatgcgaaaactatttgcgttatttgaggtaaaaaccgcaaaatagcgtaaaatcgtggtttgaccagccgggatttagttgcatctttttcaacattttatacactacgaaaaccatcgcgaaagcgagttttgataggaaatttaagagtatgagcactatcgaagaacgcgttaagaaaatcattgttgagcaactgggtgttaagcaggaagaagtattgaacaacgcttctttcgttgaagacctgggcgctgattctcttgacaccgttgagctggtaatggctctggaagaagaattcgacaccgaaattccagacgaagaagctgagaaaatcactactgtgcaagcagctattgatttcatcaacgctagccagcagtaagcgaacatatctaggcggtcactcgaccgcctaagttttttctatccctagcgtcatattttccctccttggaggacaaacgtgtctaagcgtcgagtagttgtgaccggactgggcatgttgtctcctgtcggcaatacggtagagtccacatggaatgctcttcttgccggtcagagtggcatcagcctgatcgaccatttcgatactactgcctatgcaacgcgctttgctggcttggtaaagaattttaactgtgaagatttcatctcgcgcaaagatgcgcgcaagatggatgccttcattcaatacggcatcgtcgccggcatgcaagccatgcaggatgcggggctggatatcaacgaggcgaacgccaatcgtattggtgccgctatcggctccggtatcggcggcctggggttgattgaagaaaaccatagctcactggttaacggtggcccacggaaaatcagtccgttctttgtgccttcgaccattgtgaacatgattgccggtcacctgaccattatgtatggcatgcgtggcccaagtatttccatcgctactgcctgtacctcaggtgtccataacattggccatgccgcacgtatcattgcttacaatgatgccgatgtgatgctggccggtggtgcagaaaaagccagtacccctctgggtgtcggcggctttggggcagctcgtgcgctctcaacccgtaatgacaacccacaggccgcaagccgcccctgggataaagaccgtgatggttttgtgctgggcgatggtgcggggatgatggtgctggaagagtacgaacatgccaaacttcgcggtgcgaaaatttacgccgaaattgtcgggtttggtatgagcagcgatgcctaccacatgacatcgccaccggaaaacggtgctggtgccgccttggcgatggaaaacgcgctgcgtgatgcaggtgtgacaacgtcacagattggctatatcaacgcgcatggcacctcgacgccggccggtgataaagccgaaacccaggcggtgaagtccgtatttggcagcgatgccaagcgggtgatggtcagctccaccaaatcgatgaccggccacctgctgggtgccgctggggcgattgagtcgatctttaccgtgttggccctgcgcgatcaggcagttccaccaaccatcaatctggacaacccagatgaaggttgcgatctggacttcgtcccgcacgaagcgcgtcagactaaagatatggagttcacgctgtgtaactccttcggcttcggtggcaccaacggctcgctgattttccgtcgagtatagttctagccaactcaagctgataaaggcccggtgcactctgaccgggctttttttatggtgccaggccgtctatcgtagtatgtgcctgatatgctgtcgtagtgaaaccacagtgaggaaacgcatgtactggataaatggacaacaacatgacgccctggcagccagcgatcgcggtttgcagtttggcgatggctgctttaccacctccagggtggtggatggcaacatcgatctcttcccctggcatcttgaacgcatgcagcaggcggcgcagaggttgctactgcctgctgttgactgggctgcattggaacttgagatgcgccatgcggctagcactctcccccatggcgtggtcaaagcgatactgaccagaggcagtggtggacgaggttacagcccgcacggctgcgctgcacctacacggatcgtttcacgcagcacctatcccacgcattacctgtcatggcgtgaagaagggatcagcctggcgctcagcccggttgcgctggcacgtaatccactgctggctggcttgaaacaccttaaccgcctggagcaggtgttgatccgcgcacatcttgaccaggccgatgcccatgaggcgctggtgcttgacactgcgggtatgctggtggaatgctgtgcggctaatttgttctggcgcaaaggaaaaagcgtctttacgccaaatctggatcaggcgggtgtcgctggtgtgatgcgccgccgcgtgattgaacttctggcgggcagcgagtatctactgcattacgtcagtgaaccgctagagacgctggccgatgcggaggaagtgctgatatgcaacgcgctgatgccgttgctgccggtgaatagggcacaatcatggcgctacccttcgcgccaactgtatgattttttgcgaccacactgttaatgatggctgattgatgaagagaaaaaagctcaagattgttgtactgctgctactcctggtgttggcttcgctgtattgggggcatcagcggattgaacgctttgccgatactccgctggcgattgggcaggaaacctacttcaaactgcctgtaggcactggccgtgtggcactggaagggctgctggtacgcgacaagttgatccacaatggccgctggttcccgtggttactgcgcctggagccggaactggccgaattcaaggctggcacctaccgtttaaccccggggatgacggtacgccagatgctgaaactgttggcgagcggcaaagaggcccagttcagcgcgcgctttatcgaaggttcgcgtctgaaagattggctgcaggtgctgcaagagtctaaatatgtcaaacataccctgacaggtaaaagcgaggcggaaatcgccaaggcgctggggctgccggaggggggcgtgctggaaggccgtttgtatccagatacctatctctatacggcaggaaccaccgatcaggcattgttaaagcgttcgcagctgcggatgtataaggcattgcaggacgtctggcatgcgcgagacaccagcttgccctacaaaacgccggaagagttgctgacgatggcttcaatcattgagaaagagactgcggtagcggaagagcgaaccaaggtcgcttcagtgtttatcaatcgcctgcgtctgggtatgcgtttgcaaaccgatcctacggtgatctacggcatgggtgacagttataccggtaacatcacccgtaaggatctggagacggcaacgccctataacacctatgtgatcagtggcctgccgccaacgccgatcgccatgccaagccgtgcttcactggaagctgctgccaatccggctaaaaccgattatttgtactttgttgccgacggtaagggtggccatacgttcacccccaccctggccagccataatgcggctgtacgtgcctatcggcagggacaaaaggaaaagaatgaaaagtaactttatagtgattgaagggttggaaggcgcgggtaaaactaccgcgcgcaataccgtggtcagcgtgcttaacgagcagggtattaacgacattgtatttacccgtgaaccgggcggtacgccattggcggagaagttgcgcgagctgtttaaatgcggcgcagagggcgatttgccaaccatcaaggcggaactgctgatgatttatgccgcgcgggtacaactggtggaaaccgtgatccagccagcgttggcgcggggaacctgggtggttggcgatcgtcacgacctttccgcacaagcctatcagggcgggggccggggaatcgacccacatttgatgagttcgctgcgtgatacggtattgggtgacttccggcccgacctgaccctgtatctcgacttaccgccgtcggtgggcctgcaaagagcgcgcgcgcgcggagagttggatcgtatagagcaagaagcgctgccgttctttgaacgtacccgtgcgcgctatcttgaactggcggcgcaggatgcgagcatcgttaccatagatgcggcacaaacgctggaacaggtcaccgccgatattcgccaggtggtcttacagtggctgcaacagcaggaagtggcgtaatgaactggtacccgtggcttaacgctccctatcgtcatttggtggggcagtatgcggctgggcgtggccatcacgcattactgctgcatgcggcggtgggcaacggcgatgctgagctactctatgcccttagccgttggctgatctgccaaaagcgcaatggtgaaaagagctgcggtgagtgtcacagctgccggttgatgctggcaggcaaccacccagattaccacgtactggccccggaaaagggcaaaagcagcctgggtatcgaaccgatccgccaagtgattgagatcctctattcccatgctcagcaagggggagccaaggtggtgtggctgtcgcaggcagagctgttgaccgaggccgccgccaacgccttgctgaaaaccctggaagagcctccggccaatacctacttcctgctaggttgccgtgagccctcaagcttgctggcgacgctgcgtagccgctgtttctactggcatctggccagcccggatgagcagcttagcctgcaatggctgaaccgccagggcgcgggtaatccgatcgatcgcctgaccgcattacgcttgcatgacggtgctccactcgctgccgaacagttgctgcaaccgaatcgctggcaacagcgggccgcactgtgcaacgccttgagcgctgctctgccgcagtgcgatatgttggccctgttgccggcactgaaccatgacgacgtggcggaccggctacactggctgtgcgcgttgctgatggatgcgatgaaataccagcagggagccgcgagctatgctctgaatcaggatcaactgccgttggtccagcagttggccagccgtttgagcagcatttcgctccagaaaatcatgcagcagtggcttaactgccgccatcagttactcagcgtggttggcgttaatcgcgagctgttgctgacagaacagttactaggttgggagcagatgctcggcgctaccggttactcatcccctcattcgttgtaaaagagttaattatcatgttattagtagattctcactgccatctcgacagcctggattttgccaccttgcaccacagcgtggacgatgccctggtcaaagccaaagcgcaggatgtgggttttgtgctggcggttgccaccacgttgccgggttaccaggcgatgactcaactgatcggtcaacgtaacgatgtcgcgttctcctgtggcgttcatccgttgaatctggaggggggctacgattatgccgaactgcgcagtctggcagcggctgaacaggtggttgccctgggggagaccgggctggattacttctatcagcaagacaatatcccgttgcagcaagagtcgttccgccaacatattcgtattggccgggatctcaacaagccggtgattgtgcatacgcgtgatgcgcgtgacgatacgttggccattctgcgtgaagaaaacgcacaggattgcggcggcgtgctgcattgttttaccgaagatttgccaacggcgaaagccttgctcgatctgggtttctatatctcgttctccggcattgtcactttccgtaacgccgagccgctgcgcgaggtggcccgctatgtgccattggatcgcatgctggtggaaaccgactcgccatacctggcgccagttccacatcgtggtaaagaaaaccaacctgcctatgtgcgtgacgtcgcggaatacctggccgtattgaagggcgttagcctggaaaacctggcgcaagcgaccaccagcaacttttcacgtttgtttcacatcgaactctgatccttcgtctaggcttagcgaaccgctggcgataatctaattctttttaagctcgtaattaatcctcgaaacgggtaatgttcccacccgtttcaggggaactgccgggcgaattttcatctttcttcacaaaaagtagacgatttttgaaaaatggccggtcagattcatcgaaacgtgactgccatcaaacattgttcagggtatttattttactctgcgtaaaaattaaaggggtgctcagacaccctgaaaatgcaggggttttctctcccccctctgcaacgcgaaaattcgcgagaagtagcaaagcactattactcaggagcacactcaactatgttcaagaacgcatttgccaacctgcaaaaagtaggtaaatcgctgatgctgccggtttccgtattgcctatcgcaggtatcctgctgggcgtcggttccgccaactttagctggctaccgctggtagtctctcacgtgatggcggaagccggcggttccgtattcgccaatatgccgttgatcttcgctatcggtgttgccctgggcttcactaacaacgacggcgtttctgcactggctgcggtagtggcttatggcatcatggtgaaaaccatggccgtggttgcaccgctggtgctgcatttgccagccgaagagattgcggcgaaacacctggcggataccggtgtgctcggggggattatctccggtgccattgctgcctacatgtttaaccgtttcttccgcattcagttgccagaatacctgggcttctttgccggtaagcgttttgtgccgatcatctctggtctggccgctatcattctgggtgtgatcctctccttcatctggccgccaatcggtacggctatccagaccttctcacaatgggcggcttatcagaacccagtggtcgcgtttggtatctacggttttgttgagcgtgctctggtaccgtttggtctgcaccacatttggaacgtacctttccagatgcagatcggcgaatacaccaatgccgctggtcaagtgttccacggcgacattccgcgttacatggcgggtgacccaacagcaggtatgctgtctggtggcttcctgtttaaaatgtatggtctgcctgctgcagcgattgcgatctggcactctgccaagccggaaaaccgtgccaaagtcggcggtatcatgatctccgctgcgctgacctcgttcctgaccggtattaccgagccgatcgagttcgccttcatgttcgttgcgccgatcctgtacgtcatccatgcgatcctggccggtctggcgttcccaatctgtattctgttgggtatgcgtgacggtaccagcttctcacacggtctgatcgacttcatcgtcctgagtggcaacagcagcaaaatctggctgttcccaatcgttggtgtcatctacggtctggtgtactacaccatcttccgcgtgctgattgccaagctggatctgaaaactcctggccgtgaagacaactcttccgaacaggtagctcagggtggctctgaaatgtctgctgcattggttcaggcattcggcggtaaagaaaatatcaccaacctggatgcctgtattacccgtctgcgcgtcagcgtggccgacgtatccaaggttgaccaggctggtctgaagaaactgggtgctgccggtgtggttgtggctggctcaggcgttcaggcgatctttggtaccaaatccgacaacctgaaaaccgatatggatgaatacatccgtaatcactgattcaggtaggggagttaatggggaggcttaggcctccctttttttatgggttgattaacaacatggggaggggggctcatggatctctgctcaaacaaccaa

SEQ ID NO: 190 - DNA, 28518 bp, unknown
  Altogen  635822 strain
  misc_feature (7155)..(7228): n is a, c, g, or t
  misc_feature (28267)..(28403): n is a, c, g, or t
ggtgagtcactctaacttcaagttaacccgatcggtcccttctccttggggagagggttggggtgaggggcgttgcaccggtcccgtaatcctaccattttggggcatttcacctcagcggcaagcgcctcgccgggctttatgctatcttacgcgccagaaaaccctttcagagagcccgtcacggtggaaaaaaagaaaagtttcccgcagcagaaaagcggcctgcatccgcgcaatcgccatcgctcacgctatgatttccctaccttgatcgccacctgtccgggattggaaccctttgtgaagcccaacgcctggggcgatatctcggtggatttcgccgatcctgccgcggtgaaaatgctcaaccgtgccttgctgatgcacttttatggcatcgaacattgggatatcccggccgactatctctgcccaccgatcccagggcgtgctgactatctgcatcacctggccgatctgctggcgaccagcaacggcggcgagatcccgcggggtaaaggcgtggcgatcctggatatcggcgtgggggccaactgtatttaccctatcatcggccagcgcgaatatggctggcgctttaccggctcggaaaccgatccggtctcgctgggggccgccaagatgatcgtggcaatgaatccgacgttaaaaaataccgtgcgcctgcgccagcagaagcagcaggagtgtatctttaacggcattatcggcgttgccgagcgcttcgatgctaccttgtgtaacccgccgttccacggttccgagcaggaggcgcgcgccagcacccgcctcaagttgcataagttgggtaaaggagcagtggcggaaaagccggtgcagaacttcggtggcaagaacaacgaactgtggtgcgaaggaggcgaagaggcctttgttcgcaagatggtggaagagagcgtcggcaaagccaagaactgcctgtggttcacctcgctgatctctaaaaacaccacgctgcctgcgatttattatgcgctcaagcaggccggggccgcagaggtgcgcaccatcgaaatggcacaggggcagaagattagccgctttgtggcctggaccttccttgatgccgagcagcaagccgcctgggcggcagaacgctggcagtaattacccgaccgttgccggcgatcttgccggcaacgattatttattctgtcgttcctttcattctgtctggcttgcgttatcctcaatattgttaataaattcccacgctgctcattagttaaaaaaacaataattacctagcttaataaccgtttttatccagttaatctggagcattgtcgtgcgcaatattcagggcgatagcgcgcttactggcgagcaagaaatgcagaaaaatagagagtgcttgccgttaactccatctgccagaaggatttacccgatgtttttaaacctccgtcagtccagcagcccgtggcgtgccgaattggacgccattgaagatgcggtagcgatgatcgtatttaaacccgacggcaccgtattacgtgccaacgatctgttcttgcaaactatggggtttgagcgccaggaagttattggtcagcatcatcgtattttctgcgatcaaaactatgccgccagcccggcctatcagcggcattggcaaaggttaaatagcggcgaagccattaccgataatatcaggcgtattcgcaagggcggtgaagtggtctggctgcagggaacttataccccggtgttaaataagcacggtcaggtggtggagattatcaagatcgccagcgaggtgaccagccgtatcactcaggcccaggagcatcagagcctgttaacggcgctgaatcgctcaatggcgatgatcaccttctcgccaaccggcattatcctggatgccaacgacaatatgctcgacctgatgggctatcggctggaagaggcacgcggccaggcacacagcatactttgtacgccggagttcgccgattctgacgagtatcatcagcactggcaacggctggcccagggggagtttttgaccgggcgtttcgaacgcctcaaccggcgtggggagcgggtatggctggaggccagctataacccaatcatcgacaatgaagggcgggtattaaaggtggtgaaaattgcccaggacatcacccgccagactttccaacagcagcatgaagaggaaatggtgcgaaatgtccaccatctctccatggggaccgataaaaccgctgcccaaggggcgatcattgttcagcaggcggtgcagggcatgcagcaggtagaggtggccgcgcggcagacttcagacgtggtcagcgacttggggcgctgttcgcaacagattggcaatatggttgaggcgatccgcaaaattgccgcccagaccaatctactggcgattaacgcctcgatcgaagcggcgcatgcgggtgagcatgggcgcggtttctcggtagtggctaatgaggtgcgtaccttggccgaacagtcccgtaaggcggccagcgaaattgagcaagtcaccaaaaccattcagcagggggtaacggcggctatcaacaagatggtgacctgtgtggaacaggcgggcggcggcgtggcgctagccaaggatgccggggaggtaatcaatcaggttaatgtgggtatgcaggacgtggtcaagctgatgcaggcgtttacctcggtcaaacagggggatgtgatccactgaggttctgtatctgaggcggttaaacgaacgcagcatccagcgcctcttaggtcgaacacgtcattgagcaacattgtcatcaataaaaagccccttgcggggctttttattatcgcttcaggaaacgtgctgtaagaactcgcgcaggcgtgggcttggcgggttgttgatcaggtcatgagggttgccatcttcggcgatccggcctttgtcgataaagatcaggcgtgaggccactttttcggcaaagccgacttcgtgagtcacgatcaccatcgtcatgccttcttcggccaaatcctgcatcactttcagcacttcgtgacgtaattccggatcgagcgccgaggtgggctcatcgaacagcatcattttaggcttcactgctaacgcccgggcgatagcgacacgctgttgctgtccaccggaaagctcggaagggtagtggtgagcccgttcggccagacctaccttggccaacagaacgcgcgcatgcttctcggcttctgccttcttcatgccccgtacgcggatcgggccaaaggccacgttttccagcgcagtcaggtgcgggaacaggtagaactgctggaacaccataccggcttcctgacggataaggcggtcgtcaaccttaggatcgttcaccttcaggccgtctacaaccagctcaccactggtgatctcttccagcttgttgatgcagcgcagcagagttgacttaccggagccagaaggtccgataatcactaccacttcaccctgtttgatgttcaggtcgatattgtgcagcacctgggtctggccgaagtgcttggagacgtttttaaattcaatcacaggattttcatccttctttccagacgacgcagcacgaagctaagcatcagggtaataatcaggtaaatcaccgctacggcgctccagatctccagcgcgcggaagttaccggcaataatttcctgcccttgacgggtcagttccgctaccccgatcacgatgaacagcgaagtatccttgatgctgatgatccattggttacccaacggcggcagcatacggcgcagagccaacggcatgatcacatagcggatggtttcgcggcgcgacagccccagtgctagcccggcctcacggaagccgctgtggatcgacaacaccgcgccacgggtaatttccgcaatgtaggcgcccgagttgatcatgatggtgaccacggcggcggtgaaaggatcgatgcggaaatcgctaaaggccatgggcagggcaaagtagataaacatcacctgtaccacaatcggcgtaccgcggatcacttcaatgaataccagtgccacatggttggcgatccagccgccataggtacgtgcgaaaccggcaaccagtccgatgatcaggccgccaatcagaccgaggaccgaaatccacagggtcatcttggcgccttctaacaaaattgggatggcgggccaaatggcgctccagtcgaattgcatagcgttatctcccggtgatccaagcaaggggatcaataaacaacaaagcacagggggcgggtacacctcccctgtgcttaactaataacttattggcttattaacttcatcaattacttaggttcggtaccaaaccattttttgtagatttcgttgtaagtcccattgtcgcgcagagttttcagcgcgccgttgaccttttcacgcagttcgtcactgcctttcgggaaggcgatgccatactgctgggcttcaatggattcgcctacggttttgaacttgccagcgcccgcggttttgatgaagtaaaggatgtttggcgtatcgtgcagcacagcgtcagcacgcttggtgcccagttccatataggcgttgtcgatgttcgggaactgacgcagatctttggttttgatgtgctgcttggcgtaatccaccgagccagtgccgctcttcactgccaccactttgccatccagatcctggatgccttttacactgttgttgtcagcattaaccatcaccagcaggccgcttttgtagtagccgtcggaaaattcgatcgcttttttgcgttcgtcggtaatggtgatacctgccagcgccagatcgacgttcttggtttgcagcgcaggaatgataccgctaaagtccattggcttcagggtgtaatccagcttcagctctttggcaatcgccgcccacaagtcgatatcgaaaccgacgtattggtcaccttgtttgaattcaaacggcacgaaagcggtgtccgtggcgacaaccagcttgtctgctgcgtgagagctaacggcgaaggccagggaaagtgcggccagggaaactttaaaaatagacttcatgagaggaattcctgtacaggttgcggattacccattttttatgttgcattttgtgctatggaagaatcgtgccaagtttgcaatcattgtaaaaacaagggtttgcgttatgatgttgggtttggatagccaattataatttttatgcaccaccagcgggcaccaaaatggtgcatcgcgaccgccgtggtgcaactgagctatcatcaactaaacaatagccgggaaacaaccgataattaacaattatcgatcaataatgataactaactctaactttatagctatagtcagatttcatttggtgcaaactggcgtgttttgaagggaagtagggttaacgcagctggctgtctttgctgccccggcgattgaacaggctactggaagcctgctttttatccatttcagtctggcagttaacacagtagcgcaccccttgcagcgccagacgccgggcttcggggatctctgtgccacattcctggcaatagtgctcgctttcgccatggccgagcgcctgacgagcacgttgcacggcatcatctaccgttgagtcgatttgatcctgcaccgcgccgtctgctgtccatccgcctgccatgcccacctcactattgaacctgtgaatgcttgcaatcttgcttggatcatattcagtgtaatccagcctgttttttataccactcggcttacagataaaaaaacaggctggggcaaggcccacagcctgttgtttcgccgccaagatgcctggctttactcgatattggattcgataaaccacaggaatttgtccagatcgcgcgatgcggcggtgaacatgtctgcggtgtcttcatccggcacttccgtgatggcttggcggatgtcgttggcgacggctgcataacgatcggccagcgctttcaagtgatcttgcacgctgtgaatattggtcggatagcttttcagcggggttttgtcattcaccacctgtaccgtacccagcgcaacgccaccgagctgtacgacacgttctgcaaaagtatcttgatggtcggtgatggcggtgcggaagccgtcgagcatttcatgcacggcaataaaattggcaccacgcatgttccaatgcgcctgcttggtgatcaacgacagatcgatgaactgcacaacctgatggttcagcgccttgatggcggcctgcttggtttgctcatccacgtcattacgggtgtacaacaggtcagaagatttcgttttcaccagtttagcggtactcatatagatatcctcttcttgatgggtgtaatcctattttgttacgggagaaattatagcagcttaaatttattttgcagggcgaaaagggcgattaaataaataggtaataaccgctggatatttttatcataaaggcgtatggcatattttatgattcgtgaggtgttgataagaaacgttttttaagcttttagaggataaggggtgagatccgccactaataatagacaccgattgaagggatatttcaatgcgtaattattgcagggtgtttctgagtgttgaaatagggcttgttttttccattaattcatattgatagccaattatccctaaggtgtgcgccgtaactctttttgtacaatcacagcttgatatggatcgagtctctgttgagcaagggcgcaggtattttgaccgtatcggtctgcgtcttgccctggataatatgcagcgcagcatggcgacctatttcgtaatgcggcagttgtaccgtcgagagcggcggtaagaatagctcaccaatgccaaccatattgtcgtaacccacgaccgccacatcttgcgggatgcgcaggccctgcgccagtagcgtctgatagaccataaaggcgatacgatcgttaccgcaaatgactgagtcgaacatcggattaccctgcttgatatgcgctaacacaatggctgggatatcacggtagtgctcatcgccatgctccatatagacatgcatgagggcgtcagggttgatacctgcttgccggcaggcgcgctccaatccctgacggcggcgcaaggnnnnnnnnnnnnnnnnnnnnnnnnnnnnnnnnnnnnnnnnnnnnnnnnnnnnnnnnnnnnnnnnnnnnnnnnnntcgtctggaatgtagctggctacaggatcgtgcaaactttcacagttggccagcacgcacgggagggtgagcagtttgggcggcagcggcacctgacgtagccccatggtggtgtagatgatgccgtctggccggtgtgaaagcagaaggtcgacaatggtatctgggttatcgtcagagaacatatttaccacgaaactgttccagccatacgcccgggcggtctcttcgatcgacagagtgatttccaccgagaatggtgtggtaacagtatcgagagccagcaccccgatagtattcggcgtagcatgagcaccgcgtatttttttcgctgacaaatcgggaacgtaattggtctcattgatggcgatctgcacgcgtgccagggtctcaggctttagcctttccgggctattgagcgcgcgggagaccgtcatgagcgacacattggccagtttcgccacatccttcagagatgccatatctattactcccgtcattactttcaggtaacaggctatacgacgaagttactgatgtaaaaggttcagcggctattctgtcgtagaaagcgaaagaaccgtagcgagtaatttttgatctcgatctcacttttctaatgttaacgttaacttttgtgattaacatcatgaatctcagcaaaacgacaagcgtttttttatttgttaacgttaccatgctggcattactccaatacgagaatgccataatgaaagcgcatcactctcatagctacccactactcagtgcattactgttcttctttttcgtgtcctggtcctctactggctctttactctctatctggttgcaccaggaagtggggctcaaagccggagataccggtattatctacgcggtgttgtccgtctccgcgctactggcgcaaatcttctacggctttatccaggataaactcggcctgcgtaaaaacctgctctggacccttaccgggctgttaatcctttccgggcctgcctatttgctgtttagttatctgttacaaatcaatatattgctcggaagtctcttcggcgggatctatatcggcatcacctttaacggcggtatcggcgtgctggaatcgtataccgaacgtgtggcgcgccagagccagttcgaattcggcaaggcgcggatgtggggatcgctgggttgggcagtggcgacgttcttcgcagggctcctgtttaacatcaacccgaagctcaacttcgcggtctccagctgtgccgggctggtgttctttatcctgctggcgcggttgcgggtgtcttctgccccgcacgcgatgcaggaggcggtgtccggtggcaaagtgaagctggatgacgtgcttcgtctgctgacgttaccgcgcttctgggcgctggtatttttcgtcatcggtacctgtatttacggcgtttacgatcagcagttcccggtttacttctcttcacaattcgccacgttgcaggaaggcaacgccatgtacggctatctcaactcgttccaggtgttcctcgaagccgccgggatgttctgtgccccgtggttggtgaaccgcatcggcgcgaaaaatggcctgattttcgccgggatggtgatggcgctacgtatggtggcctccgggctggtggaagggccgctgctgatttccgtcactaaactgttacacgcggtagagttgccgatcctgctggtcgctatctttaaatacaacagcttgaatttcgacaaacgcctgtctgccaccctctatctggtggggttcgcctgtaccagctcggttatcgcttcggtactgtcgccgctggcaggctatagctacgaaaaatacggctttgcccagtcttatctgatcatgggactactggtgttctgcaccacctttatctccatcttcctgttgcgctccagtaagttatcttcagatcctctgatgtcgcaaccttctgctatatgattgaaaagagtaaagaatatgacgtattcaatatccaaggctgaacaggagctgcaggctaaatgtgaaacgctgaacttgcgttggtatccacgctaccatcttgccgcacgcgcgggctggattaacgatcctaacggcctggtctggtttgacggttggtatcacgctttttaccagcatcatccttattccacgcagtgggggccgatgcattggggccatgcgcgcagtaaagatctggttcattgggagcatctgccggtcgcgctggccccggaaggcccggaagataaagacggctgtttctctggctcggcggtggttgatggcgacaccctggcgttgatttataccgggcataaattccatggcgacgccagcgatgaggctaacctttatcaagtgcagtgtcttgcgactagccgcgacggggtctgcttcgagcgtcaggggatcgtggtggatactccgccgggcctgcaccatttccgcgatccgaaggtgtggcgtgaaggggatagctggtacatgatcgtcggcgctcgcgatggcgagaccggccaggtgcgcctgtatcgctctgcagacctgcatcagtggcacgatgccggagttcttgatgaggcggaaaaagagatgggctatatgtgggagtgcccggacttcttcaccctcgaggataaacgcatactgatgttttctcctcaggggatggcggctgaaggtttcaacaaccgtaatctgttccagagcggctatctgcttggcgaatggcagccggggcagccgtttgttcgcaaaagcgagtttattgaaatcgaccacggtcatgatttttatgcaccgcaaagcttcctgactcccgatggccgccgcatcgttatcggctggctggatatgtgggaatcgccgttgcccgaacagcaagatggctgggcgggaatgctctctcttccgcgagagctgagcctcggcgcagataaccgtctgcaaatacgcccggctagagaggttgaaggtctgcgcggcgcatggttcccatggccagtgagtacgttgaaaaatcagcagaccacgatggtggaaaactgcgaagcgatggaggtgatcctaaattgggattgtgctaacagcaacgcagaacagtacggcatctgcttcggcgacggtctgcgcgtttatgttgatgcgcagatgcagcgtctggttctggagcgccgttatccgcagtatggcctgtgcggagtacgaagcgtaccgttgaccgccggagcatcgctgaaactgcggttgttctttgatagctcttcagtggaagtttttgccaatgatggcgaagcgtgcctcagcagtcgtatttacccggacgctgcgcgccgtgagctaatgctatttgcctggagcggctcggcctccatatccgaggcgggggcctggcagctcgaataatctattttcatatgctagggatgtggaaaacaaattcttgtgcgcacttgtaccgcatcccgaattcttcaattcataggattcaaatattttaataacccgtttggtgtgacgggagtaattgttgtcgtcatcatcgagtttcacccataaatataaattaaataataatggattaacgatgaaaaataatgatggtttacatgtaaaaaaaatccgggtcggatgtttgctcacgtttttagcaagcgcttgcgcgaacgcccaagcacctcaatctatcgaggagcgtttggcgcacctggaacagcgactgaaagagaccgagcagcgggccgtccgtgcggaaacggagattcgtgcgctgaaacggcaggatacaccggtaacgatggccaacgcgacgccaaccaagccggtattacagcttaatgactatggtgaattaaaattctatggtgacgttgagtttaatatggatggcgctagccgtaccggcagtctgacctcgttgaaaaccagtgctaataaaaactgggcgccgggcgataaagagcgctgggatattaacgggcgtatcctgcttggctttgatggattacgtaaagggtcgaatgggaaatatgccggtttcagcgtacagccgcttgcggatatgaatggtaaaatgaatcttgatgacgcggcatttttcttcggccagcaggatgactggaagattaaaatgggtcgttttgaggcctttgatatgtttccgcttaatcaggatacctttattgaatattctggtaatacggccaacgacctgtattccgacggctacggttacatttacatgatgaaagaggggcgcgggcgcagcagcagcggaggcaacttcctgctcagtaaaacacttgataactggtattttgaagtgaatacgctggtggaggacggtagttcgctgtttgtcgatcagaactatcacggcaacgcgctggatagccgtaaaaacgtggtttacgtgcgccctgtagccgcgtggcaatccggagagtggtcggtggctgcagcgctggagagcaaccttgttaataatgcctacggctatcagaatcagcagggcctttgggtcgaccagtccaggcgtaccggctacggtatgaccatgagctggaacacgctgaaaaccgatgcgcagaacggggtggtggtgaacctgagcaccgcatatcttgatgcgacggatgaaaagaacttcagcgcaggtatcaatgcgctatggcaccgcgttgagctgggctatatctacgcgcataataaaatcgaccgattcaatatggacagtgtgaatgctgaatgcgacggcgattgcgcgatcctggcaccaggaaactacgatatccacaccattcatacttcctggcaactgccgaatattatggatatgccaaactttaatacctacctaggggcttatgcttcctggctggatgcttcgacaataaatccaggtgacaccgatatgcgctatggcatgagggtgcgcttcaaatatttattctaaaattggggggttaaggaaacactatgaaactgtggacagttggcgatgcggtaatcgatttattacctcagccagatatgcaatataaagcttgcgctggtggtgcgccgttaaatgttgctgtgggtgcagctcgtttgggatgtgattgtggttttattggcagagtcggtgatgacccatttggccactttctccagcaaacactctattcagagggagtcgaaacgcagcatatacaatttgatgagcaatatcataccagtaccgtgctggtagcgctggggaatgatggcgatcgcagtttttatcctctaaaaatctacccgattttgatgatgatatattgcacttttgttcgttggctctggttgccaagcagagccgggagaccttggtcaaggcgataagtttaataaagcaacgcggtggcatcttgagctttgatgtcaatctgcgggagaaaatgtgggggaatccacaggagatgctggcaacggtaactcaatttgctcatcagtcagatattttaaaactctcagaggaagaattatactggataaccggtacgactcattatgaaaaagcgttggaaagagttaagcgattcccttctagccttaaaattgtcacccgtggtatccaaggggctattgtcttatggcaagagctggccatacacgtagactcgtacaaggtgaaaagtttagatacgatgggggcaggagatgcctttatcgctgggctgttggcaaatatctctcttggaaatggtttgcttgattttgaacaattgaaattagcgctaacgcaagccagcgcctgtggtgcgctggcgactacacaaaaaggagctttatcagcattacccgatgcggagagtgtcagaagttttattggatctgagcatagactgacatttaaggttaattctctaaaccctgatgagtgaaatgcagcagacctattgtaatataagatgtctataagtcagttaaaatggatatcgacgcaaagcatgaaaattaacgtggtgggcaccagcggcagcggtaaaagcaccgttgcccgccaattggcgcaaaagctggccgtaccctatatcgagatggataagctttactggcggccaaactggcaaaatgcctcagatgacgagttcttgcatctggtcggacaggcgctggtatcggcccgtgcagggtgggtattggatggcaactatacccggaccaaagccgtgaaatggcgggacgttgactgggttgtctgggttgattacggattctgtcgcacgctgtggcaggccgttcgtcgcgcatcggtgcgggcttggcacaagactgagctctggcccggcaccggcaattgtgagagctttcgccgctctttctttagccgtgagtcgatcatcttgtggaccatcaaaacctaccgcaagaatcgtataaagtatctggcagaccagcaggacgcagccaatcattctatccgctttatccaactgcgctctccggcggaaacagcggcttttctggctagcatctgctaggaagctttattcgattcagcttttcatgttcgttaggcatgattttctcttttggctgaagctgcttcagctaaaacatgatcttaatctgattaatttgtcagctagaatacataattcataatttttcttgctgtacgtcacgcaatttttgttatttccatcctgattgttgaaaaagtgaccctcatcgcattttaaaacgggctaagaacttagtttgtgatggttttgctaaaaccattcagctaaccaggaaggaacaataaatgaaaaagcttactgtactttcgctcgctatctctttgatttctgggtatgccagtgctcaagctatcgtattgaccgacagtgagaacggtattgaacttggcaactggcggattgacagctcacagctgaatattcccggcccgcgtttcagcctgcaacagcaagtcttgcacggtggcaagcaagagggatcgaaagtccttaccctaaccagtgatgggttgaccatcgcccttagcccaacgcgtggtatggatattctgcatgtcaacggttcgggcgtaaggttggggtgggattcaccggtaaccgaggtggtcaatccggcttatatcaacttggagagtcgcaacggggtgggttggcttgacggttttaacgaaatgatggtgcgctgcggctacgaatggaccgggcacccgggggtagaaaacggcacgttgtatacgttacatggccgtgcaggaaataccccggcttccaaggtggtggtagatattgctgaaaaagcgccttatgaagtccgtatccgcggcctgctgaaagaaaataccttcaagaaaagtaatctggaaacctggactgagctgcgttacgttcccggcactcaacagtttacggttcacgatcgtttaaccaatcgtgctgattatcctcgtgactatcagattatttatcacagtaacttcggtaagccgttgctggaagagggggccgtgttcagtgcggcaatcaaagagatttcgccgtttaatgattatgccaagggcggtttgaaagattggcatacttaccaggggccaaccaaaggcttcgatgagatggtgttcaacatcgtgccttacagtgattcgcaaggaaaaaccctggcgatgatgaacaacaagaaaggggatcggggtgttgcgattggttttgatacccatcagttgccggttttgacgctgtggaaaaacactgacacggaacgtcagggctatgttaccgggattgagccagggaccagctatgcgtatccggtaaaaatcgaacgtgagcaggggcgaatcaaacaattacagcctgggaagagtaccgatttcgagctgacttacacgttgctgaaaaatgctgaacaagtaaaagagtaccaaaacaagataaaaacgctgcaaggtgaccgagaagttaaactggtcgagactccaattgcggtggaatagcgtctggtgaagggggagcccgtcaagcgaccggctctttggcgtcaaagcagcagttcgtagtggactttcaccaccactttcttgatattttttggctcagtgatctggcagccgggtttgtggggttccaatgggaagaagatcacgtacatgcccggcgtcaggttcagggtctgcgggctgcgtttgatatccagccattgcagatctttgctttcatcgtaaagatcgccgctttcccaactgtctggcaggccaaaatcgatccgctcttcgccgccgatcaggatctggatatccaggtactcctggtggagttcggcgcgtttgctttccgccggttctgtcatcagttccatcacgttcataaacacccgatcgccatcgatttcatgccgccctaacggcaggccaggcaaatcatactgacgcacggtattgaggatattggctaaagcgggtgagaggccacgtccgaagcgggggttgtacaaactgccgtagatcatcctgattctccctaataaaaaaagacctgctgcgagtatgtctattattgttcaggaaaaaagttaactggcttgcaatcatgcaaccttttgagcgtggcgccggggacttgccgccagacgccagcgggcttacgagaggctttcaacctttggtttgggtttgatggttaacgtagcccccatggaggcggtaatgatggcggccaatgccaaccattgcgtttggttaagatgttcgttgaggaagatcatgccggaaagagcggccattgccggttccagactcatcagcgtgccaaaggtacgggcggggatcttgggtaacgcgataatttccaaagagtatggcaacgcggtagacagcaccgcgacggccaatgccactggtagaatatccacgtttaacagcgcactgccggcttgccaggcaccgatcgggcagaacacgatggcggcgatcaacgatcccacggctacggtgcccggcccgtgatctcccccggccttctggccgaaaataatgtatatcgcccaacaggcaccggcacccaacgcacaggctgctcccacggggtcgatactgcccatatcgtggccaagcggcagcaggaaccacaaaccggcaatggccagcgccacccagatgaaatcgatcgggcggcgggaagagaacatcgccaccgccagcgggccggtaaactccagcgccaccgcaataccgagtggcaccgtgcgtaaagaaagataaaacaggtagttcatcgctcccagtgacagaccatagatcagcaatggcaaccggctaccggcggcgaagcgcatacgccacggacggaaaatgataaacaggatcagcgtaccgatgctcaggcgcagcgtggtgatgccttcggcaccgaccagcgggaacaggcttttggctaatgaagccccgctctggatcgagatcattgcaatgatcagtaaacacacgggcaccagcgtggaagacgctttagtggttacagacgaagacatcctttctggccttatggaactccccatcgtctgggaaggaattgagtacaggtgttgcacagtgtaaaggaattgacagcaaggtgttggcgaaaaacggggggccgggttgaatctgtcaaaaatatgcgccaacttggttcgagtaaccaataagtgctctttttttaagagtattctggaactcggataggtgattagcgtcacaaaaaggagtataattcgcgaaaaatacaggaaaattagtatgctatagtgttcttgaaatcttctgttacacgatacaaagatttagacactcatttaaaggcagagtttcacgctaatttttgctatattttcaatgtatgagaaattgaagcacttttataataaaacgcgtttgaggtggttatgaaaaaaattgcatgtctttccgcagtagcagcttgtgtattggccgtaacagcaggtaccgcatttgctggtgagagcaccgtatccgctggctatgcccagggcgatttccaaggcgttgttaacaaagccgacggtttcaacctgaagtaccgttacgagtacgacaacagcccactgggtgtgatcggttctttcacccatctggaaaagaataactctggagacggcttctacaacaaagcacaatacgactccatcactgccggccctgcttatcgtttcaacgattgggcgagcatctacggtgtgatcggtgtgggctatggtaaatttacctccaacgctcaagacggtagcaacaacaacagcaacagcgactatggcttcagctatggtgctggtctgcagttcaacccaatgcagcaggttgctctggacgtgggttacgagcagagccgtatccgcagcgttgacgttggcacctggaacgtgggcgtaggttaccgcttctaagatttccccatgccttcgggcatgagcgtgtgaccttgttggtcatgcccaatgaaaatccgccttttaggggcggattttttttgccggtaacccacatccgactctatatttaatctatcgatgtatttggcttgcctaataccgtggtcggttgcaatgaaaaacgcgccgtacggggatcgcgctcatatccttgcggctcggtaagcagcccataaagctctggccgacggccatggatccaacgcctcccgctgctcatggggattaagctcagatccagatcggcggtaaccatggcgtcctgagctgtccaggtctctgacaggatgcggccataagggtccagcagcatggcattgccggtgcgcacctcatcatcatctcgccccacaccgttgctgaacaaaataaacaggccattatcatgggcgcgagaaggcagccagcgcagtagccaaccgcggccagtgtcgccgcgaaaagcctcttcgatcgccgccggattttctttacgttgctgccatagcgtcagcggtatcggcttcatgccgtgcgggctgcgtgaatttgtcccaccggtctggtgaggggcgaacaggatatcggcacccagcagcgtggtggcacgtgcgttctccaccaggttgttgtcccagcagatgaggatccccatacgtacgccccaaggtgtgtcaaacacggtataactatcgccttttgcgatcagcgcatgctcaaaaggatggagcttgcggtgaacatgggtttggccatccggcaggcaaaccgcataagcgttgtacagttggccatcttcacccagctcaatcagcccaacgccgatggccattcgataccgctctgccagcgggcggatgcgcgccagtgaggggctggtggcgataggctcagccagcgcagtgatttcgctgtcggccaggtggcgtacgtgccagtaaccggtaatgcacatttccgggaaggcgaggacctgtacgttgtcggcggcggcctgggtgataaagtcttccataacgcctagattgtagttcttgtcattggcgcggtgttgaaattgtaccgacgcagcacgaagggtcgtggtcatagcaagctcctgtggggggttttgttcgctaattacagcagccgcatcgattactgtataatcaattaaaatcctcttttgataacctaatggaatggataatcgtcaattacgtgcctttgtcgcgctggctgaactggggcgctatcacctggccgccgagcggctgtgtatcacccagcccgcgttgagcaagcaaattcaagctatcgagttgcaactgggtacccggctgttcgagcggggccgccagggggcacggctgactaccaatggtgccgcgctgttccccagagcgctggagttattgacccaacacgagcagtttcatctgtatgcgttgcaggtggtgaagggggaaaccgggcgtctggccttaggctttgggctttccagttttcatctggcaccacagtgggtggcggcatttcgtcagcgctttccggcggtggtggttggcctggaggatcttccttcggaacggcaatgccagttgttgctaaacggcgatctacaggctggctttgtacgcttgcccgttgttgctcccttacaggcacagcctttgctgaccgatcggctagtgctggcagtgccgagagcgatggcgttgcaggaggagaacctgttggcggatttccaccgttttcctctgctgcagttggaaccttcacgtggccgagggttgagtgagcaggtgctgcgttttattgccgctcaggggctgcgggccaacgtggtgcagcaggcggaggatatccaaaccttgctggcgctggtggcggcggggataggcgtggcgctgttgccgcaaagcattgcgtttattgctccggttggggtcgatattctgccgttaagcggcgagcagacgcaatggcaggttgggctggcgtggaacccgcagcggcctgatgcgctgcgggataattttatccagggtatcttgaactcagagtggtcggtataacactaccgttggtaactggtggtattcgctgcggtggcttgccacaaagccgactttcttcgccaagccaagcgaagggcggttatccggcgaaatgatacaaacgactctgtcctgtgagaaattctctttggcccagaccagcgcggcattcaaggcttcggtggcatagcctttaccgtgcgcagccgtgatcagcgtccagcccatttcggggacatcgagtgcgggttgaatatcacggtgaaaatcggcgaagccaattccgccaatatccctgccgctgtttttctcccgcaccgcccagtagccataccccagcaatttccagtggccgatgtagcgcaacagacggccccagctgtcctccttgtcgcgtggcgtgctgccgatatagcgcaccaccgcaggatcggcccacatggcggccaaatcgtcaaagtcttccagccggtgggcatccaggatcagacgttcggtgatcaaggtgggggcaacggtgtgagtggtcatggcttccttcctgaacaagggaaaaggcgctgccggagcaacgcctcaagatactcaccactgtagccgaactgctttggctctagcaataccgggaagttacacgcccagccacagcagccaggtaaaggcgaagccacttaaaccgagcagggtggttaatactgtccaggttttgagaccatcagccactgacaggccaaggtatttggtaacgatccagaagccggagtcgttaacgtgcgataagcccaagccgccaaagcaggtggcgagcgtgactaatacaagctgcatcgggttaagcccgataaccgcttcggacagcaacccgccggtcgtcagaatggcgacggtagccgacccctgtgaggcacgcagtgccagcgagatgataaatgcagccgggatcagtggcagaccaatagtggtcagcacatctgccagcgccttacccacgccagactcaaccagcaccttgccgaacacgccgcccgcaccggtaaccataatgactactgccgcagttggtaacgcccctcccatcacatcgctggtgtgttgcagactccagccacgacggattgccagcagatagaacgccaataccagagcgatcattaacgctacgcctggtgagccgattaatgacaaggcatcacgcaccggcgaacctgctggcagcagggtggcagaaacggtgcccagcataatgatggcgataggaataacgatcagcgcggtaatcaatccggcactaggaggattgatccgatcgctgagttgtgctttgccttccggtgcaggttcaggggttgccagttgcagttgttccaacacctcaatggaaagtgggtaggctttacggttgagatattttgccgcgaagtaaccaatcacccccaccgggatacagatgatcaggccgagaatggtcaaccaaccgatatcggcactcaacagccccgccgccgcgaccgggccagggtgtggtggcagagctacgtgcaccgtcagcatcacaccggccatcggcaagccaaacttcaacggtgagactttagccactttggcaaagccatagatgatcggggccaggatgataaagccgacgtcgaaaaacaccggaatgcccaggacgaacgcggcactggtaagcgcggcaatggtgcgctttggccccagcgctttgctgaaacgctgcgccagggattctgcgccgcccgaatgttcgatcattcttcccagcatcgcacccaggccgatgataatagtcaccgagccgagtacgccgcccatcccggcggtcatcactttcatgacttcgccggttgggatcccactggcaagcgcgaccagtagactaacgaccagcagggcgacaaacggctgaaccttcgccttgatgaccatcaatagcagcagtacgacacccagtacggcaatgatcagtagcatagttggagacatagcatagcctttaattcaggtaagagtccggcaccgcgatcgccctggggcgatacgggtgcgtttattttttatgttattgaaactggtgttggcgcgacgagttcttgattacaggtaaggtttcacccaccccagacccgccgtcgtttccccacggggtttatattcacaaccaatccagccttggtaacccaccttatccagttgggcgaatagccaaggataattcagttcaccgtcatcgggttcatttcggtctggcaccgaggcgatctggatatgggcatagcgcccggccagtgaggcgatcagattactgatattgccgtccaccaactgtgcgtggaaaaagtcgaactgaataaacacgttcgggcgatcgatggcggccaccagctccgcagcctgatgctggctggagaacaggtagttgggcttgatcggtgggctgagcgcttcgatcaacaccttgatgccgtgaggggcaaaggcgtcggcggcgtaacggatattgctgataaaggtttcccgatagcgggcaatatcttcgccgggcggcactacgccagccatcacgtgaacgttagggcacttaagggcgatggcatattccagagcgcgatcgatatccgcacgagcatccttctcgcggccgggcaacgccgccaatccccattcgcctgcacccacatcgcccggcgcggtattgaacaacacttgctggagaccgttttgttgcagtttctccgccagtagatcggcgggggaatcataagggaacaggaactctaccgctttaaatccggccgccgcagcggcatcaaaacgatccagaaacgagtgctcggtaaacatcatcgataaattggcagcaaattttggcatggttcagctccgtaactcggcaatttcatcatcggttaaatagcgaattgggcggttgccgagggtgaaaatcagcttggccgcatcttccatttcttcggtattgttcgcggcttcccgcaggctctcgccggtgaccacggggccgtggttcgccaacaggaaagccttgtagcttggggccagcttgcccagatcttccgccaaccgcatatcgccggggcgatagtaaggcaccaccggcacctggccgacgcgcattaccacataaggcgtgaacggcttgatggcgtttgccgtatccaacccttgcaggcaggaaagcgcggtcagataggtgcaatgcaggtgcactaccgccttgcacgtcgggttgttctggtacagcgcgcggtgaaaactgatctctttcgagggtttgtcgccggaaatccattcaccgctcaggctgactttcgacagtttgtctgcctgcaactcccccaggcaagagccggtgggagtggccagcagggtaccgtctggcaacaacagcgaaaggttgcctgctgaaccggtagcgtagccgcgctggaagaacgaagcccccagacgcaccatttcttcccttgccagccgttcagtgtcagcggtcatcgtcatactgaaaactccgtttgtgctctggcgaaaaagttttcatcgccgaaattgcccgatttcagggccagtgataccggttgttcaattgcgcgtacccaaggcacgcctggagaaatgcatgggccgatatggaaaccgcggatccctaacgcctgggtgaccacgccagaggtttcaccaccggcaacgataaagcggctgaaaccctgttgttgcaggcgtttaactacttcggcaaacagggcttctaccgcctggctggcagcctcggtgccgtattgctgctgggtctgttgcagttgctccggctcggcggtggcgtacaacaatggggccagttgtgaggcctgttgttcaacccatgtgcttagctcggctgcgtaggcgctgcgatctcctgctgtgatgcagcgcgagacatcaatactctgtgccggagcctgttggcggtagcgtgctacctgcttgttggtcatggtggagcaggagccggaaagtatcacggctttctttccctgtggcgctccggcagattgggctttctcctggccaggttgcgcccattggcgggcaatgccgatcgccagccctgaacctccggtgaccaacttcatggttttcagcgcttcgccctgtgtcagcagatgctgttcgttcagggtatccaataccacatagcgcacgccaagctgtgccaactgttgcaacttttcctgcaccgcaccggctccacgatccatctctgccgcgttgaccagcccgcaacgcccgctggcctgggcctccatcagccgcatcagattactgtcggtcattggcgtcaccggatggttgcgcataccggattccgacagcaactggtccatcacgaacagataaccttggtataccgtgcggccatttaccggtagcgcaggggaaatcaccgtttgctgttcgccaagcgcatcgagcaaggcatcggtaaccggtccgatattgccctgggctgtgctgtcgaaggtggaacagtatttaaagtaaaactggcggcaaccctggcgttgtagccaggccaaagcctgcaacgactgctcaaccgcctggtcgaccgggcaggagcgcgatttcaggctgatcaccactgcctgcgagtcgacaggggtatcatcctgcggcacgccattgagctggaccgtaggcaaaccgttttccaccaggaagctggcgatatcggtggcgccggtaaagtcgtctgcaatcactccgagtaacattatgagttctccttattcttcggcagctcgatcccggcgaagatcttgattactgcactgtcatcttctttaccgaaacctgcgttgctggcggaggtgaacatgttgaacgccgtggaggccaatggcagcgggaagtgcagcgctttggcggtatcggctaccagcccaagatccttgacgaagatatctacggcagattttggtgagtagtcgccatcgaccacgtggcgcatacggttctcaaacatccaggagttgcctgcggcgttggtgaccacatcgtacatcacgtccagcgggataccggcgcgagcggccagcgccatcgcttcggcaccggcggcaatgtgtacgcctgccaacaattgatggatgatcttgaccgttgcccctaggccgatttcgtcgccaatgcggtacactttcccggcgacggcatccagcaccggttgcaattgggcaaaggtgctctcactgcccgaggccatcacggtcatttgaccggccgctgccttggctgcaccgccggaaactggggcatccagcattggcaggttatacgccaacagtttctgttcgatttctttggcatccgccgccgcaatggtggaagacaccatcaccggcgtattcggtttcaactgtgccgccaggccgttatccccgaacaggatctgttttacctggttggcgttaaccaccaacagcagcactgcatccagttcggttgcaaagtttgctgcgctggtggcggcctgtttggcaccggcctgctgtagcgccaccaatgcctgtggattgagatcgacgccataggtggtcagcccggcattgatgcaggacgtagccgcgcccatgcccattgaccccaaaccgacgatacaaactgcgtagtttcctggttgtgccatgatgcacctctgttaattttagtgattatttgttttgatgtgttaaatgtaagcgttattggcgtggatatcggtgatcgtcttcacaattattaacaatgaaacggacagactaaaaaacggttactcttgctaacataatgcttttaaatgttttttatgattatgaccggcttcacagcctgaaaagctttactaccgtcgcacgaaaattgacgtaaaatcacaattattatcatcgtagtcacagagggggaaccgtgatacctgttgaacgccaccaacaaattttggcgctggtgtccgagcgcggagcagtcagcatagctgaactgaccgaaaggctgggggtctcgcacatgaccatccggcgcgatctgcaaaaactggaagagcagggcagcgtactccccgtctccggcggtgtgcagtcggccgaacgagtggcgattgagccttcgcatcaggataaggaaggaatgttcagccagcagaaagccgccattgggcaactggccgcgcggcagatcccggccaacagctgcatctatctggacgcaggcaccaccacgttggccctggcgcgccagctcggcgagcgtgacgatatcaccgtggtgaccaacgattttgttatcgccgcctatctgctcgaacatagccagtgcaagctgatccacaccggcggtacggtatgccgggaaaaccgttcctgcgtgggggccgctgcggctcaggctttacgtaatctgtttatcgatctggcgtttatctctgcttcctcatggagtatgcgtggtttgtctaccccgaacgaggataaggtggtggtgaaaaacgccatcgttgaggccagtcgccgccgcattttgctgagtgatacttccaaatatggcaaggtcgctacctatctggcgctgccgatttcagtctttgaggtgatcatcactgacgatcacctgccggaagcggcgcgtgaggcgattatgcaggcaaatattacgttgcttactgcggtgcagtgactttcaatcccgctaatctgataaacaacggggtagttatcgctgccccaagggcctggccacagactccacagcagataatacaggcattgagtcgcaataactccatcacgtccaggtgccagccggtggcacagtcagcctgctaccacataatatttactcataaaacgttaatgatttatttttaaggattcacctcaatgtggtgttggtatacatcctgacgatgtatgggtaacaccaggttatatcgctatgtaaagtcagtgtcaggctaaggcaactacctggcagtgtgacaggttaaaaccattgatttaaatgataaagactatcaacgctagtcgaaagcgcctgctttttcagtcatgtaagatcttagtgagggttaaatctgcgatatttttacattaaaacatgccatatatggtgtttttatgaagtttttcgctataaaaaaatttatgacaacataaaaatctaaccttgtgaaatttaacgaatcaatatatcaatagtcagcgcgtttcgataatctttgttttggtcatgagaaaattcttattccagggagaaggaaaaatgccacagttaatgacaattacccgcggtctatttactagcgacaaaaacgttcacaaaggctttcttttaattttaatcaaatgattttattaacgattaatgcctgggttgtctgtttttatagtgaaagtcgtgaatataatgaaatataaatttaatgaccgtattatcttcgatgtcgatagcggaacgctgagtttgagcgatctgtttgacgatactgtcaccatctccaacccatccaaacgcctgttacagttactgattgtccaccagggcgatgccgtgagccgtgaagtgatcttcaaaaaggtgtgggatgattatgggatgatttccagtaacaataatcttaaccagtgtgtgagcaagttacgtagagtgatcaaggcgctgggaattgatgaggaggtgatcgtcacggttcccaaagtgggttttatgctgcacagcgaaatccagattgtgtcttgtgaggatgaaaaggatacgccgatccttgctgccgaaccgccggtatcagccgctaaaaccatacccgtggtggtaggcaaggtgttctcctgtgcttccttgcgctatggttgggggatagtgggctttgtgtgcgtggtattggccagcattgcgttctatattttcaatccaagcatccggcaagagagctatttgggcaaatcgggtaactgcgcggtatttatgtcgaactccacggttcaggcagatccggcattcagcgatgatgtgttgacgcaggtagtaaggcaaaaaatccaatgccagccggatgaatacctgttgctgatgcgtggcaatcaggtgaagtcgtatatttcaggcatatcacggctattttttctccgctgcaagattttgcgagagcataagattgaactttgctctggcctggaaagcgaatcctccctttaattgaatgatgctgattggctgtctggataaacacccgacagccagagcatctttaccttagattaaaccacttcattaacgttatcccccttattccgtcggctcactaccccgaaatagtaatgcccctcaccctagccctctcccaaaaggagagggaaccgaacgtgccacaattttattagggcactccgcctctgcatcaaccctattgcagctcaattcttcacctgaacacggcaatgtaccaactccctcgtccacaaggagagaggaccgaacatgccnnnnnnnnnnnnnnnnnnnnnnnnnnnnnnnnnnnnnnnnnnnnnnnnnnnnnnnnnnnnnnnnnnnnnnnnnnnnnnnnnnnnnnnnnnnnnnnnnnnnnnnnnnnnnnnnnnnnnnnnnnnnnnnnnnnnnnnnngcacggcaccgtacttgctccctcgtcgaaaatgagagaggaccgaacatgccacaattttattagggcactccgcctctacatcaaccctattgcagctcacttctgcacctga

SEQ ID NO: 191 - DNA, 440 bp, unknown
  Altogen  635822 strain
  misc_feature (101)..(155): n is a, c, g, or t
  misc_feature (201)..(333): n is a, c, g, or t
ggccagcgataatctacgttacgttgcagggtctgatagggcagcgtttgcagtcgaaacacaaacaaccccaggattaacatcatggtgactccccctcnnnnnnnnnnnnnnnnnnnnnnnnnnnnnnnnnnnnnnnnnnnnnnnnnnnnnnnaacgacctgtaacagcatccgcttggtttgtgcttcggtcatgccnnnnnnnnnnnnnnnnnnnnnnnnnnnnnnnnnnnnnnnnnnnnnnnnnnnnnnnnnnnnnnnnnnnnnnnnnnnnnnnnnnnnnnnnnnnnnnnnnnnnnnnnnnnnnnnnnnnnnnnnnnnnnnnnnnnnncttctgcgctttcttgtcgatgtcgctggattcattattgataatgccgagcttctccagcacccaatcaatcccctgacgcaacttgttgaacgctttgagcggca

SEQ ID NO: 192 - DNA, 40383 bp, unknown
  Altogen  635822 strain
  misc_feature (14950)..(15080): n is a, c, g, or t
  misc_feature (15114)..(15222): n is a, c, g, or t
  misc_feature (19222)..(19325): n is a, c, g, or t
  misc_feature (39216)..(39216): n is a, c, g, or t
  misc_feature (39876)..(39876): n is a, c, g, or t
atctgatttattcaacaaagccccggtacggttcaatcaagggtaatggggccggttgcctatggcaatctccattaaacggattccccatgacattctaactgtttacttcagcttacgacttggttccccccgtaacactgtcaccaatgaggctgagggcatgcgaccaacaccggagaaaaggtattggtctgggctgatatgattcctggtgagactcaggttgatacagccttctcggtggtgttttaaatacatcaaatgaaccaccattccgggcattaaaagagctcgcgtggccgacgctgccaataccacacggcaaagtggagtaaccccatcccaccatgcgcaatcaaataaacctcaatcagtccggttaatgtctgatgccattccttgacgatggaagctaacggggaatccacctgccacagtacaaaccagcttgcgccggaaagcaccaccagactgagcgcgcccagacctaatccttgtacacatgccgccaatcccttggggttggcctcgggcaattggcgtttcaacagggtatggatatcctgctggatctgggtgatgtcgccccacaggtaaggataaaaataacgtaaaccgcgtcgtctcaagcaatacccaatcagcacgacactgagcgcaagtaacgtaaggccaatactgatatgcatcagggtgaagaaacgtggcatcgtcgcgctggccagttgctctgttgctgtcaatcccatgccattactgttgagtatttgaccaataatcaaaaaggctatcagtatatgcaggcaccgcaagtaaagcggttgatagagtgaaaggaaatgccagaatgtccgtcgtgatgtaggtgcttgttgcatgatactcccttttattttaccggctctcgtgccgttgttgttaaatcatagcctgatttaaaaaaatgggtgcagaccattacgtcaattgcatcaaaaacaggggcggattaccgtctgatcgtacaaccttcctgctcaattcgaagagcgaccaggcccgtgtaccaacaccagcaagcccctgtcagaggaataaccgggtcacccacggacccggtatatccatttttcattcaccggtactttcattccacagcattcactgagccgtcctctgtctgaaaaaaccggtcattcccgcactggtggttatcaacagcgttttaccccgcccgtttatccggcccccgtaacgcgacctcggtcgtgtagtgatgctctttacagtaggggcaggttctcaacccgacataggccttgtcgcagcgcacgcagaagtactctgtgggcgcgagtttcgccaggacgggggcaaacgcctgtttaacggcaggggaagcgcgtggggggctctgcatcaggcgatggcggcaatccttgaccaaggtggggtctgctcgcatcaggtcgtgttcaaagtatctcccttcggtatgcgtcacgcgcagcaccaatcgactgtggcaatcatcacaataatagtgcgtggtgctcatcggcggcaaggtttcagcccgaacccgttgcccgtggctatcgcaggcctcacgcagtcttttaaactgcatcgaaaggctccccgttccaggcttgatcccggtcgtaacgtaccaacgcctgccgatgctcgggagatctaaaggcttccctgaagcccagtataaagttatcaagttgtgcggcccgccagcgcgcatcttcctcctcctcattcagcttgaacgggaacaacgtccgacagtgcacaaacagccgcagtgtcgggtgctcgctgatgcacaatgccggggttcgggcgatcatcagcaacgaccagtacaagcgattggccacctcgcccgtgggaagcgcacgcctgctgccggtgatgtcgtcctcctgcacgtaaaaaccgccccccacgatctggcgttcccccaactcggttagacggcgcagcagtaatgcctgctttgtctgaatggcgttagtcgggtcaaactgtgggtcggtcgatgcaacgccctgcggggaccgtgaggttgacggtgataaggatgaaggcatgttgttctactccggttaggccacctcggtatggatggctacacaggtagggtgatgtacgtaaaaaatctgccaggatgactgtattcacctccaggcggtgtgttcactgcagttaccgtcgtaacgttccagcgcttgctggtgcgcaggggaccggtagtcctcccgaaagccccgcaagaagttattgagctgtgctgcacgccaataggcgtcttcgctgtagtctggggtgagcgtcaggggaaatagcgcccgatagcgattaaacagggccaatgtcggatgtgcatggcgggcatcgacaggcatcctgattgaccatagcaagcgatcactcgcttcgtcggtcgaatggatacgaacatgacccgttgctcgatcaccaatgacgataaatcgccctccggcacggctttcgcccaatcgggtcaggcggtgcagcagtatcgcctgctgtctggtcaaggacgtattggcaactgcctgctggttcagtgttgacggttgtgatggggatagaggcatcttcgtactcctgttctgctcccacggtatgggaggctacatagagttgccggtgtacataaaaaaacgcagggggcatcgcgggtgaaaccaaagtgtggatgccggagccttccgctcagggcgaacgtgccgactagtggctaaagcgcctacagtgggctgacgcccatgccattgcgattgacctccccctctggcgctcttactggtacaaccgctattcgaccgaaggcagtgtggttaatgggtaagtaactctctttaccggtaattttttacgtacattcaattaatatgttaccaaacctcaacccctgttgttgagccccgcaggtggctcctatgatctaataagatcggagttggaagacaacacgtagggaaccgccagagttcccgatcagtcacagagaacaacgtgatcgtagagagatccagtgatccagcttaatgatatcgagtcgttgaacagtaaaccgatcactgccgtcaagcaccttacccagtgagattgctgcccttgtgcccagcgtgtactctttacgccataggtacagagaccaacggataaaccggcttaatgcaacaaggggtagcacaacatggagatagcgataatgcccataaccctcccgatgtcaaacatgaaacgccacacacttcccccctttcttgtcggtaaaatcaccgagcagatctacctcaactggctcagacgtaaagccgatgcgcacaagcgtagggatcggcagcgcggatttcaggaagtaacggcgacaaagtaccgggatgcaatccatgaggccgtattgtgcagtgatgggagagatacttacacaggcgagatgttggattggacgttgataagtcagtacgacaacgatgcatcaaaggaaggtcgacaccactataaagcccgtttcgccatgctacctaccctcgaccatgttgaggcctctgcacactcggcatccttcgtgatttgtgcctggcgtaccaacgacgccaaaaacgatctgagccattctgatttccttgcgctgtgcgagaaggtcttgcgctacgcaggctatagcgtagattcaaatggcagagtattaggctcttggtgaaaggcatgacgcgcgcagcggttagcttggcgtctatggtaattgagtcataacggtgagttgtgacacaggcaaggagggctatgcacgtcaaaaaagcagtcgaatgccccttttgacggacgccttggctaacccactgaaaatactgcctctatgtaccgctaaaacgcgctgtacgggctactgcgaggcgtacgcgctaaatcgatacccaagctttacctttgggtggaaacccggctaagggtggttataaaccgcacaaccctctcccccaatctagaccattccctcctctcaacgctttctaccctccagtcccccaggtatgctcccccgacgggctataggcgctctctgccactgcggggcctaccacgctggattgcctcagggacccggcttgcaaaatacaccggacgctcggtacgttgctcctgcttggccagataactcaaaatagaccgcatccccttacgaccccgctggtctgaaaacgccaccacccgttctccccttacgctatactgtggcttgggttcacaacgatgggcatggccttccccctgggtcactgttttccaatactggctgatggcttcccagaatggccatactttacggtgcttctgtccgtcgatatagaatgcggcgtggacgtgcaagcgatgatcttgaccgtactccatgacccaggccacccccacgagcccagagagcgtggtacaacgttcaagcaagtagaccatgtcagcactgagctggtactcgtctgcctgcatgaaggacgaactgctacctaagtaggcaaagtctaccctgagcattaacagtttggagtaacgttcgaataagcggtcttgatgacggtacagtagattcagtagcgtatagtcgggttggtagtgagtattgaaggacatgagtcggtacctcagtgaaagggttaaacgggggttactggctatcccttggcggtatatttttaccgttcagttgaaaagggaatacgtcgatatgggaaaaggttcgacaagggtaagttgagatcccctgcctcagggtgagtgatgaagttagctgtttacttttcacctggcgtcggtgtagattttgattggacggcaatagcaactcaaagaggggaattaaatcggatccgagaatgaattaaatacccccttctttgtaaggaaaactaaataaacccccttctttatataataacagtaataacctaaatgatcagccgaatgagaataatacactcatggtttcacaatgaattactataatttcaatcattgtgatcccccgctgattaaccgtaccctctgttttgaacaggataatatctcacctaaaaagtgctcgcgaatgagtcggaggtaaacgatcggattatcgctcaggcgtcgagttcaggtgatagaaatagccaagtggtttttaaagcagaatgatctggtactacaacaggggaagactgaggttatcgaaccagggttaggcttgcggacgggaatgctggatacgctcctgtacccactgctctatctcactcttcagccaacgtgaactcctgcctaatttgattggcttggggaacaatccaccttggataagcttgtaaaaccacttatcggtcagcccggtaaaacccgtgatgaaggtcatgtccaccaaccggtcgttggtcaggtctacggtgttgtgcatgttgatgccctctgaaatcgattggattagagagaacacggtgggtttctggtttctacgtaagtcaaccgggcaccatgttcgtcatggcattcctgactgacgtaaaaaatctcagaaccaactcatcacttttactcactgcgtttactgcactcgcctagctgcctgcagagccaacgtctaaagctgcgctacccgcaaacataaaaaccatcaactaccgtaaacccgtcaaatcctgatctatggataccataggctacagcgacagagagttaccgcaggaccactgactcaacggcaaagcacaacccgcctgggccgctacttacgcttatacctaccctaccttgcactggatacgcctcattgcaccagagcgccgtgctgacgattaaatggggcctggcaagctttctgttggttgcaaggaaacccgtactgtggatgagcctggtgggggccagatgctcttaaacttgcttagtagcgctttctccaacctttttgcggtggcggtgtgattaatttatgtgctccagcttaccaacgtgaaaatcaagatgtcaatgggaaggtgcgtttttcgcacggtacagtaatgaatgcaaaactcaacactatggtgatggtgaagatgaacagaataaaaatggtcagtagaaagctgcctgcatcaagagtggttttcgttgttgtatattaaaatcagcctaaaaacgaccacattcctactgccaacgccgtttacattgatttttatcatcaaaaaaactacattaaaacttcttaaagtatcgattttttactcattttctggtgatggtatgatgatatggaaaggcaggataaaagtagataacaaacgagtaggctggttgtttttgtacaggatgcttgagaagggcatacacttggatgccaatgcaaacttgttcaccaacgaggggattgaatctgcgatcaatgacgcttttaatcagcatttcgcctctgctggagctgaggcaggttttagaaagtttatgttggaggaagtcaaaagtcgcttgctacctgacaatgctttcacttggttgtcaaaaaatgacgcggcttgcttctatgtgttggagtatcttaattgccattactcatcttcagatgagatagatggggaggttagcctatacattaaagaatgggtgaattttcacgcgatttataacaaatatcctgcatcaagcagggagcggtttgatacgatcactgagttttttgatcgttcaaaaaaaacgattgatgataaatttcatttgctaaaacatttacagtccgagtggtctttttatcggtttacgtatggccgactccaatggattgacaaaaatgacaatgaccaatgtgagtgggtttggaaatacattttagataaattttccctgcggatcgcagcagaaattatcatcaccaataaccatgagcgctacatggccatttgtgctgtgctattgaacttagaggaagtaagacatactaaaaaaggcagaaaggaaaaaaaagaggctaaggttttattagatcgtgatgaatttattgacatgatgcataaagtctggaaacaaagggtgtacagagataacatacaaaaaaaagcatccaccactgggcttcatttgaaaaaacaaactttatctaaacttaaaaaattagaaaaaagcactcagcaatctgccgaagccatgattgaaagctggatcgacaaacattatgcgaaaatccgacaaaccaaagaataagccctccttatgctgacataacacaaaggctggctctaatctggtacgatctcagatactcagccacagaatgagcaagtgcgttgatgaatcagcacattaccagccagcgaaaccgcaccctattcaaacttcaacatatcctgaatagcgaacatgcggctctcgctacccatgaggccttgcgtatcgacaaccgcggaacgtttaccatcactgacagcccagtccataaacagttgccgcctgtagcatggaaatccgcatcctcgttgctgacaccactggtgacatcggctttaatcccttgccactctccattaaaggcaagaacgctcggctcgttggacgcaaagcgacccgactcgacctcagacccggcatagagcagttcatggcgtaccagcggataccagcgcaggtatttcttcgggcgcgcttcaaacagggctaccaccggtatttgcaacgccgaactgagatgtatcggggcactgtccgccgatatcaccaggcccagcaggctcattgccgccacccgttcgctgactgacggcgtagtgaggcaacgcgcgttaatattgccaatcggcggttctgtcgggggtgataaaacaaacaggtccatagcaggactcaaggtggccgccagttgacaccatttctcacgactccagcgacgctggggcgatttattggccataaacagtccaacacggcaccgggtgcgggtgcttgtcccgtataaacgatgccacttcgcctgtagctctggtgccggataaacctgcagctgcagtgcattgctctccatctgacccagttctggcacccgtgcataccccgagagggcctcgtggcgaagtacccggttggcgacgtgttgcggcttgcggtcatcaaacgcggtctcggcgttatgccagcgacaatccctgacattgagttgccgggcaaactgaatgctgtttttatgcaccccgccgttgggaatgacccgcaaatcaaaaccccatcgccgtaaacgcccaatcagggtaagccggtcaacgagcacagccagtcggccaggccgagggttgcgctcacggtgtttactgtagacataggcatggcattgcgtcaccgccgggttattgagcaacgcatcctggttgtccctgcttgccagtacatggctttctgccgcaggtcaacgttgcttcatcgcctgtataaatgccgtggtacagaccatatcccccagaaaatccatccggattatcagaatacgcttcatggagccgtggcttctcgcctgaccaccgtcaagctcgccaggtttgccgcgatgaccataaacagatgcccttcggcagagtccagcaggaacgaattgaacaggtgacaggccatatagctgcccagtatggccacccacaggttacggcaggcgaccggttgacgccaggccgcccgcaggcagcacagcatccagcccagaaacagcgccagccccagtagaccgctctggaccgtctccagcagatattcattgtgcgggttatgtacactgtagccggtctgggcgttgccgtaccagaaactcccggccccgtttcccaacaggggagccagtcttatcagccgcaacgcctcacgggcaaaggccgttcgctgccccatcgagttgtcacaggcctgataggcccgttctgccggggccagcacacagtggcgaacctcctgcagacccaacgccaggcgctccgtggcacgattgggtatcaacaccagcgccagcgtcaccagcagaccacagaccaacaccccgaggcgttgccgaccgggtaacgtcaacaacaaccatccccccacaccaaccaataacgccacatagccggtacgtccctgcaccatcagcaacacattggcggttgccagcacggccagtgccccatatcccccgcgcgtgaggccggattgtgcgaaggctcgggacaaccacaccagagccgccagtgccatgaacacgttctgggttatctgcagtttgaagaccgtcgggttctgcgggtcgagaccgcccagcgtgacatgcccgataccggacaccagactgatgaccaatatcaccgcattggccagcaaaaagccgttgataaacaccgtgagccaccggcggtcagtcaggaagaactttgccagcggcagcacgtacaacagcttttgatacttgcccaccatcttcggaccatagtcgtggtactgggtgagcaacgacagcgccagcagggcaaacatcaaggcgggcaaccagaccagaggctgtttgagcagggggagcacgtaacgataatcccgttgccacagcaggcagaccaagaccatacccaacgcgatattcatcagtgcgttggacgtcggcagggacaccccgagtaaaaatgccgtgaggccaaaccactgaaagcgaattggggtaaaggaagaggctgcggacaagtttgtcgatgacatggtgatgggcttctatcaaggtgaattaaagatggtgtcagtcactgcgccgcaggggcggtagccgacgttgtcaggatggcgagtcggtggtccaccgcacggatgaccgcctcgaccgggatggcctccagataacgttccggggtatcggtatcgacgtcgtcaggggcgggcaatgggcgataatcgcccgcccacaacaaggtatgcggtgcctgccagggcgaccactgcgccagattactggggccgaacagcacaacggaaggtgtttgcaaggccgcagccatgtgcatcggtaccgagtccacaccaatgaacagcattgcccggtccatcaacaccgccagctcaggcaagtccaggcgacccgccaaattgaccacctgctgcggttgggtacagcctgccagaatggcggtgaccagagtgacgtcttcaacggaacgccccccggtcaacaccacggtttctcctctggaggtgaggtgattgataacctgcgtgtaccccttcactgaccaggtcttgaatgcccagcgggccgcagggtggagcagcacaaaatccgtcaggtgatgacgctggctgagccggtcgacctcatcaatatcggattgccggtaggcctgtttcacgcgggttacctgcgtgggtaaggccaatggcgtcagaatgtcgagatgattcaacacggtgtgctgttgtttatggccatcaaccgccaccagcagggaatgacaggcttgccacaaccggttgttacgcgtgggataacgaaaacccaggctgaaggccggtttcagaaagcggcaatacagtgccgcccgccactggtccgacagattgatgaccaggtcgtagcgcgcgctacgcaggctgttccataaggcgtgctcaccccgatactgcgccttgaggccctggtgtttgagacgccggtcaaccgtataggccaggtagatgtcgttattccctgccagcatcgcctgtgtaccgtcatacaccagcacatcaatcagggcattggggtagttgacacgcagcgtacccaacagcggcgtggtcagcaggacatcccccagatgacgcagcttgataaccaggatgcgctggacctgctcacggtgcagcaaccggttggggagccgttggtcaggcaaccgaggctggtcgggccctgtcgatacggtggaatggggaggcgttattgtcataggtcattgtcctggaaccctgcagaaatcgtcttgttcacggatgtcgaacagcccttgcctgtcggtgatgccgttggccgatatccgtaaaataatgtgacgtgctaccagtgggacaggcaccttgtcgcctgcgtatttcactgcgttgacagactacattgatcggtaatacagatcaataaatcattattgatcgttacaaccaattaataacacggttcaatcacactgtattgagcgttttatctatcaaaacgcacatccacatcaccaggagggcagagcaggacaggaagagtgaggcactagcgcgtaagtaataactcaatgatttttcacatctatattaccaacatgagtatcgagaacccgtctcgataacacacaaggacatatcaccatgaaaccgattatccctctggccctgttggctttcgccattctctctacccctgctcaggcgaagaccaccaccaccctggcccaaaaccaggtggtcgatggccagccccgtatcgtcattttccagtacgacggcaaaaatgccttctgcctgcaggtgccgaaaaagtaccaacccaacacggcggtgggctgctttgccgaaggcgacgcaggggccatcaacagtgccgccaatggcaatctgggcagtgacgagaactggaccaacatgaaagatgccgggacaccgacctgccatgccggtgaaggcagttgtccggtgcctgccgagttgacagacctgcttgaccctaaagccaataaggaatggggcgtctggcggccttaagcccgcatagcgtcctctgctcagggggcgccatcggcggccccctttctctcaccgtatgtctgtttcttattcaaggttcctgccatgacaacacaacgttccggggtcagcgtactccatgaacatctctcgctgctgcccgctgccgtgcgtgaacgactgatgcaacgcctgcagcaggtggtgcagtatcagccggtgattggcgtgatgggcaaaaccggtgccggtaaatccagcctgtgcaatgccctgtttcggggggccccctgcgcggtcagtgatgtcgatgcctgtacccgtgccgccacccggctgcaactcacctttggggcccatgcactgacgttgattgatttgcccggggtcggtgaaagccgggcgcgtgacaccgaataccaggcgctgtaccagcagttattgcccgaacttgacctgatactctgggtcatcaaggccgatgaccgtgccctggcggtggatgagcacgtctaccaccaactcctgaacgccacaaaccccagggtaccggtgctgtttgtggtcaatcaggccgacaaggttgagccggtcgcactaggggaccggggagccctgcgcccgtcggcaaaccagttggcgacgcttgaacgcaaggtccaggcggttgcccaacactttcaggttccaccagcacacatccaggtcgtcagtgccaccacggggtatcacctgcccgacctggtggaggccttggtgaccgcgctcccaaaggaggccagcagtgcggtgaccgttcaactgcgcgaaacctaccgcaccgacgccgtactcgacaaagcccgcgacgattttggcgacaccgtcagcgaactcatcgactgggttatcgacaccgtgccgctgcccacgcccgtcaaaacgctggtcaagtcggtcaagaataccgtccggcaggtggctaaatccgtctggggctggtttttcgggtaatgcgtcacggtgagggttatcgacgatattccggcctgtgccgggtttgattacgcgtaaaaggagacaagtatgaaaggttttttgggactctattttttcctgggttttgtcaccaccgtctataaagcattctggggggaacaggcatcacgtggtctgggctacgccatcggccaggggctcatttggcccgtggcctggtttcctgccctgggcgacattctcggcgggattatctggttctgcgtcattgcagggctgctgttggcgtattacgggagacgataaccatgaaaacgacatggcctcttctgctcctgctcggcacgctatcgggctgcgatacccctgaaaaacgcgaattcatgcgagagtgcaaggcgcagggcaatacggcgatgtgcgactgtgcctacaacaaaatcaccgcccaatacggtgagggatgggggagtgacgttcgcgtcatccagagacagggctttgctgattacctgctccagactgcagtcgaatgcacgtcagaataagccccggcgttagaccgaggcgtctagccccaccactgcactattgacctactttgcgttaacacccgggaaattttccctacaccgtccagacaggctccccggtttttccggtggagcctttttattattcatctcattcagaaggctattttccatgaatacacattttaccccgtctacggcccactatcaggctagcatattgaccgccactctcgtcccccatgcgcagcgctctcgtttctggcaccaacactttggctgcgtaccccaatggttcctgctggaggcccacgtcttcaactggctgggcaggctctgtgccgattaccacgggggaatgtgggatttttacacgctaagcaacggtgcggtattcatcgccccacaaatcgacggtaatgagccatgggtactgctcaacagcctgaacggcaacggcgctgagatgggcgcacaagccgccgggatcaccgcctgcctgatggccttcaaccaccatgcctgccgcaccgagcacgacgccatgattgaacacttctaccgactgcgggagtacgcactgcaccattccgacagccgcgccattttctctctgattgactgaaacgaggttccctcatgcaacacacccaactgcttataccaccgcctcccttcaccgccaaccagcaacagattgtcagccaggcgctggcgatactcgaaacccagcttaaataccgcccttatacgttcaacgccccagaggcggtgaaaacctggctcaagctccatctgcaaccccaaggccgtgaatgctttatggtgctatttttagacaatcgccaccggttgatcgccagtgaaacactctcgatcggcaccttcaatgccaccgtcgtttatccccgtgaaatcgtgatccgggcattacaccaccaggctgctgcggtagttctgagccacaatcacccgtccggtgcagcggaacccagtgacgccgatcgcacattgacagaccgtctggtgagtgccctggacctggtgggggttcgcgtgctggatcacctgatcgttggcgacggtgagccactctcgctggcggaacgcggctggttaccttgctgaccccatcaaaaacaggagaaatgtaatggccaccttattcaatacgctgatgacccgtatgggccaacggctgctgcaacagtaccactatcccaatgaactggaatggcgctggtctctcgggtattgccagggcgatggttgtgcctgcatcggcaccctcgataacgccgctctgcagcgattattaccggtattggcggaacgccagtcactgaatatcgagacccaactggcattgttggcatccatgctgtcgccagtgacggtgtcgttgacgctgagtcgtcgtggagggcgtgcaacccatgccgggtgtattcagattgagatcctcgattttcccgacgtagaagaggcgctgtatcagactttttaccacgccctgcgtcaggatctcgacacactgtgtgcggttgccgaacggcaggggtatcaactgctcgacgccacagtgccccctacgacagcgacgtattgttggagcgacggacccgccattttgccttgcgggccagtgctgaagccaacgatgacgagcatgatcccgctgaagatccggcgttatgggnnnnnnnnnnnnnnnnnnnnnnnnnnnnnnnnnnnnnnnnnnnnnnnnnnnnnnnnnnnnnnnnnnnnnnnnnnnnnnnnnnnnnnnnnnnnnnnnnnnnnnnnnnnnnnnnnnnnnnnnnnnnnnnnnnncgcacggggcccgtttactgacgctgcggctggnnnnnnnnnnnnnnnnnnnnnnnnnnnnnnnnnnnnnnnnnnnnnnnnnnnnnnnnnnnnnnnnnnnnnnnnnnnnnnnnnnnnnnnnnnnnnnnnnnnnnnnnnnnnnactgcctggcacaggactggcaatccgaggtagtgatcaccgccaaccagccggtacgccagtggtttgaccgtgaggtcctgcccgggttgatgcacgccgcccgtcacgccattgaacaaaaacgacgggcctaccaagctattcgttctgcggcataagaggaggcccaccatgcagctccctgtccctcccttattacgcttcggtctgcaatgcagtacggcccacatcaccgaagacgacaatcaacggctgtatcagctttcccactgtcaggatgacttcagcgacggcgagtggctgcacttttcgggtaccgggtatctgttgcgattggatgcctggacgcacccggtattgcggcttaaacggctggggctatccaaagcctgccgccgtctggtcattacgttgatgaaacgccatcaactgacctacctgcatattgatgctctgggtgacatgttgcccgattttgccaccttcgactggtaatacccgcctagattcaactctcgcgttatcccatcattcttaaaggactctttctcatgaacacgagctcactgcccgtgcctggcgtattccattttctgcagcacaacaccgtctcatcacacgactggcaaaggctataccaggccatcaccaccgcttaccagcaactgtgtcaacgccctgatacgttggggctagccacagtacccgttatctgtgaacacaccggcaaccgcctgtatcaattcgacgacaacctgattgggccagggatgatcggttttaacggggaaagggccagccaccgggccggtgatccgttcatcctctaccagcgtcagacacctcatgccttgatccgctgcgatacacgaggctacccctatcagtggctggtcatagctgcactgttgctggcgaatacgtatagccccaatacctggacgatcgaatctgacgtaccactaaagcaatggcggaaggtagcccactggctgacccaccattgccagttaccggtttctccgctctgttaaggaaccccttttatgaagaccatcaacaaactcccccacaccccgaccaatgtcaatccggcctttatcgaataccaacagttgctcgcctggttgctgggccactgctacggcctagagctcaatgacacgccgtatcacgacgatcaggcgattactcagcagattgaacattgcattaccgtaagggaaaccgtcaacgaactggtggagaaatttgacctggtacgtattgaccgacctggattcagcctgatggcacaaaatccgaccttgagcgccggtgacatgctccgcgcccgcagcgcactgggattacgcagcccggtaaaccgtcgcctcacctgagcacacccatccacctcaccattttctccctacgccagcctcgcccgctggcgttgtgcctttaaaggaactccgacaatgaaagacaccgataccgataaccacgcaaacctgaacatccacgacgacatcaccccaatctggggtttacggtgtgccatcacgccacgtttaggtgccagactggtgcaacagggcaatcatctgcactttctggccgaccgcgccggttttgtcggtacgttctcccctgatgcgcttaaaacgctggatgccgctttcccggtactaattaaacaattggaagcctgcctgcggtctggtgaactcgaccaacgccgccagcattgcgtcacggtgcagcacgccggttttacttgcgatgccgataccttgggcagctttggccacgtctatctggtgatctatcagacgacacaaaccactcacggcgagtaagtcagccgtatatcagaacaccacaccttgcccgccatgatgcgggcattttacttttatggagtaataacaatgaattatgcagtaagcaccgttatcgaacccgatatcctgaccgatcacaccgaaattatctgctccaccagtattgagcgtatcgtcaccggacgtaataccgcactgacgcagattgaagccctgatccaccagcttgaagatatctcgtccattaccaatagcattggcggtggagtggcaagggactgggggatgcgtcaagacttccgctgcagttgctggctgatggagaaagttgaaacagccatgcccgtgatcacccgtaatctcgatcgcagtatatggcgagatctgatgaaacgctccggaatgctcgccatcatggatgcccaggcgcgtgaccagtggtacagaaacctggagggcgatactattccggcgatcagcgaagacagcatttacagcacgttcgagcagttgcatcgggacaagggggaagtgtttgaacgcggggtgatcaacgtcttcaagtcgctttcatggaattacaaaagcaatcatccatgtcgatttgacaaaaagatcatcgtggccaatctggtgagttacaaccaatggggatttacgcttaaccacagttatcggcgggggcagttggggggtcttgaacggatgttgttcctgttggaggggaaagcaatacccgataatcggcaggacgtcaccgcacggctgtatgaacatatcagcgccaaccgactgaaggcggtagtttatgaagatgagtattttacaatcaaatacttcatgaagggttcggcgcacctgacgttcagaaagcctgagttgatggataagatgaacgatatcatcgccaagcattaccctggcgtactgccagaacgggtataaccctgtcagcaccgtggtaagcagagctgggacagtaggcagcagtttcctaacctcagcattgtctgttactctctgattgactatgatttacttttaatcacaaggagctgctcatgggacaatcaccaacacgtgttatcactgcccatgttcctgttgaaatggcagagaagattgacgaactggctgcaaattatgatcgttctcgtggctggatagtcaaacaagccttggctgcgatcattgagcaggaagagaaccgtcatcaaatgatcttgcaggggctggctgatgtggatgaaggcagagtggtggaacaagccgatgtattgaaatgggtgaatagcctgaacagtgacacgccacttcctgtcccgcagtcagggcaaaagtaatgcaggtggtttggtcagatcatgcgttgcaggatttagagcggttgcgcgaatttattgccaacgtcaatccagaagcagcagcacaggtgcttcaatcgttggtgcttgcccccgtcaacctgctgacgcattcacgtatgggacccgcactggcaagatatgaaccacgggaagtacgtcgcttgatcatcggtaactatgaaatgcactacgaactcagagttaacgcgctctacatcttacgtgtttggcatacacgagagaatcggtaagatagcaccctgcattagactcgctaccaaacaggaatagaaataaagaatcgaacacgatgcctacgcagtttttttcacttcacttggcgtcttctatcataacaaaaccccgatgtggttcccaaaaaacactcacagggactgcgggtacaattgagggtacaaaaataaccaaatcaaaaaataaatttaaatattaataagttacattgaaatgtcgattccgagtccggcaccatattcagaagcgcttgtcaatcattcaggatgaaaaactgacaggtatgaaatgagtccaaacacgcaaaaaccgaagactggtttgaaaatttcatccagtgatatcactacccggttattgttacgaggctcttgagaatcacacctgttgccacaggtgtgatttttagcgtctattttttacacgtttcacttataaatgtcaaactgcgtcaagctgatacccgccccttaatgtcacctacctttttatctcctgctccaggatgtcacgtaagccaacagcttgaaaaatatccagtacggcggnnnnnnnnnnnnnnnnnnnnnnnnnnnnnnnnnnnnnnnnnnnnnnnnnnnnnnnnnnnnnnnnnnnnnnnnnnnnnnnnnnnnnnnnnnnnnnnnnnnnnnnncttgcggcttacgccggtacctgactaatgccaggtcacctccatccatcagctctcgctgacgttgtcatcgttatcgagtcggttgttctccttcatttcatagataagcgtctccatggggtatcccgtttttacgacgcaatggtttataaatatccttttacggatctggacgttccgttatccgtggttcggccagggtactacgtgtcgatcagagcgtaaaagacgttggtaaagcccgtattacatgggtttgtccgttacgcgctttgcgcgtcacttggtttcgtttcactttgctcaagtgacacgctgcgcatatcccgcgccaaatgctgcttctgcagatgccaaatgttccaattggcatagcagaacgccgcaaatgttgccgggtttactggacgtcgaaccaagaaatactgcattgatatgagcgttccccctagttaggagacgtcattcgttgagagataagtgtaccttcatcgcaatgttccgcgatccccgctctcaaaggctcagggggattaccgctataaaagcgttgcatttcaggtctgggcaactaggatttgaccactttacagcgctaccttgcaggtcatggcaacattgagtgttgtcggtgacaacggtacagcgctggctataataacctcaactctatagcttcagcaagcaaagagaaacgcaagaataaaatcattcaggcaacttagtgaaaaaataggtttctaacgtgcagatgattttacttactgatatgctatagcagcataatcaagcaatatcgataataattatcacagtggcactacagttaaatcgacagtagatagtaattgcaatcaacttatcaaaagtatttaccaagtttcaaaaggaatattgaaatggaagaagataaaacatatagcaatattagaagagaaaccagactctacgctaggcacatgaacaaatggtggaaaaacctacaggatgagtcaatatccggatgggcattcctaacggcgattggatgttggggtataccagaccaactttttcagcgcacagctttcattttgtcaataatatttttctttggaaagttacaaaaaatatcacgaggaagcggaaagatattttcaaagcatgaaaaagaaatagaaaacaaaatactcacactttcactcatgcaagacagaaagagtttcctcctcaagagactagagaaaataaagaaattcagaaaacccagaagcgtttttaaacggacctggcgtttcatttttagttatacattcctcgtgctttcatgcctggaaatatttagctcagcaattagctccgcattgctatatcttaaaaatattttcgtgtgaaacactacgccactataatctgtgaacgttacccacaactccacaatcggtgttccagggcttgccccgccctggagttgctcccgttcaccagaccctttagtagggtctggatcactggctttacctcatgtggatttgatggataaccgcaaatggcttgttgaggttacgtatctgccgtaatctggtcgtgacgcagatttagtggtaatggttgattgtcagataccagccgatgatcttgtcgtgcatctcttctgactttgagaagcaaatggtcttgcgggtaagccgcttgagatgggtccgcaagttcagattatgtcgttctatccgctgggtatatttcttgctgataacatggctggttgaggacaataaagtcctgtataccggccaggcatcggtcatatagaaagcgatggtaaactggctcagcaaggccagaagacgctggagtgtcagagcatttcgcgggccaaatacgtgagcgatgacgcgctttcggatacggtcataggcataaaatagccagtgctgattgcctttacagcggacatacgatcactgctcatcggcttcacagcaaataacgacttctgcctctggctcaacgttttgcgctacctgatgcggtgtgagttttttagatgacggagaacaatgttgagacttatctgcagtcagtacccttgccgtatcgcggcatccggagccattcatcgccatatcaacaatggtttgatgggtatccggtttagcgctgttgtagcgatactggagctgaaaggttttcaggcactgcttacagcgatagagctgcgcttctgagctggaatggccgttccggatacccccctgagtttcagatcaacggggacaaaccacatcaatctttgccatcagtcatccaaaataaaaagaatacaacagcactaaatcggagtcacaacccgtttttccaaagttataattatcagttctaagttttaaaatattaacccccctaaaacatgaatactacatattcaaggaggcgaatattttatattaaaacctagactagaaaacagttttaaaatataaacagatccctatcaaaatactcaaaaaaccaccctattgataaaaaacgttaaaaaacattagattctcggattaaacaggagctttcgcctatgatcaccttcagtgtaacgagttttataaagacccctttcctgtagctcaggaattaaataactcttaatatcactataagtgtcaggactaagcaagtttgggatattaaatccatccgctccattttcctgcatcttttgaagctcgatcgccaaatgagttgagtcaccaaccaagacggtaccaaggccaccgagaagcgcaagctgaacaagttgcttgacagtttccggtacaacatgtttttccgaagacgcgaattgctctgcaaaggaacgaatggccgatgacttgaaagtacttagcggacgatctggctcttgcttacttaaatcaacccctagccatcccgaggctagaatttctgctgcacggacatctgcatgatgaatcatctcttgatatttttcatgggcaacaaggttattctctgctgttataatagttatctgcggcataattttatagctcctcctttctctgccagctcggctgaagcttttgataaccctactcataataattgctgtttcgcttgttgactttccagctaaaaatatgcactcggtatttctagcggcaaaatccagtcccgtttttgatgcaccagcctgataaagtacgggataaacttggggagactgagccatcattccataacctgaaaaagtgaggtacttcccttcaaatagggttcttttcccagcagaaaaatatccatctgcttcactatcaatcatgtagggtgctcccctccagagttccaagcagagcgataagtactcctgagcataactatatctttcttcatgatttggaaggcctgtgaatcccagcgctttcatacttgaaggaagatacgaggtcacaatattccatgccatacgtccacccgttaggtgatccagtgtcgccattttacgtgtgaataaataaggtgactcagaaaatactgaggatgtcagaccaaaacacaaattctcagtcacagatgccatcatagaaatagctatagcgggatcatgcagagggaactgaataccttgattaatacaataatcaacttcactttctttttctgtatgcaatcctaatacgtctgcaaaaaaaacgccgtcaaacagaccatcctccaattggagtgctagccgcttccagtattcagcagtcaaaaatgctcccttaacctgtcctgactgatgccactgtcctgcattaaggtgggaggcactattaagaatgaaagcattaaaaatgagctgtgtagccatatgagctccctacttgcactaaaagtgaattcaagctccggcaaaatgctaatatttgcttctccgtcatatccgctctaagcgttatacgaatagctggctcattccggggtacaacgggaaagaacactggcgaagtaaggaaaccttcgtctgcaagtacggaacttagctgtaaacattgctccgcatccctacacctgataagtctgataggactggggctgactggccctccaatattcattagttggtcaaataaggacaaatttttaacaagcctatgttgaagctgagtcaatctgtctgttctatgaatagaaagtgaggccataccagcaccgagccctgcaacattcaggctttgtgaccagtttatcggccccccgtattgttcaatgaaacgtgaatagctcttttgaccgtagagaattattcctcctgaggccccaaaagcttttgctagtgaagaaactatataggtgttgtgggggaggtcgctgaaaaaggaacgagcgtatcccgttccttgattaccaacagcactcattgcatgagagtcatcacagaaaaatcccattccgtactgattctgtaagcgaacgatatctttaagaggggatatcccccccatactgtaaaatgaatccgcaatataaattatctggctatgctttttacatacggattcaagctcatccaggtcattatgaccaatagtcataactcgcgtctctgttgcacatagggctttaagttgatttaaagaataatgagcaaatcggtcaaaaaccattacaggcttctccccattattcagtgcacctgaagctataagtggtaacattgcagaggaggcactgctgcatgataaggtaaccatggatggggtaagaaaatgtgcgctgagagcttcctgatattcatcaagcaatgccaaacggcaacgatttcgagaacatgcgattcttaatgttccctgttccaaaatggcatcaatagcgcctttctgaatagaaggttcatagtccagcccaagataagacgtagtacagaaatgcaataattgacgtccatgttggtcacatatcttattccttccatttacgttaacactaagttgactagtacgatttctgtaggcttcctgccagttacttaatgaataattgtagacgcttttaagattagaaaaactttcagcactactcatacatagcaccatttttttcatcatcccttacgatgagtaggtcttctatcagttgcttcctatctcggttaaaaagggaaagagtccccaccgctgttttcaggtctttagtcaccttggtcaattcacctatggacaggttctgtttataactgacaaatgagggtaacctctccagttttttccagaaatctttatggagtttacgaccgaaaaatggggaacgaagcagcacatgcatagcttgcccgtaaaaagatgacttacctgaacgagatacttcgaagtaatcaggcgtaagtaatgaagtcactacgtcctgcacatggttacgaccacaggcatacgtcgtcaggcgaaggtcgaggctcccatgtaatcggcagtttagctccaccaaagttggtccattcccagtcagtataatttccagatgtgttggcccattacaaactcctagtgaatcaagcacctttgaagcataatcgcgaatagctgagtattcaggtaatccatgatctaccgtttccatataatctagaaagggtgattcgcctttatcacgcgttaccgcccatatactagtcaggtaatgtctccctttcagcgaaacactgtcaataatgtactcctgccctgatgagtaactttgtatgagcaccgtagaatttggaacttcataatacgaggatgaactcattacctcatcaaaggcgcgataaacttcattcacagtattacatttaaaaacccctttaacaccagcactttcgaccggcttgattataacaggatattcaccccgtttctctgcccaatcagtgattatcttaatatcatctgaaataatttgatcaggagtaagcaatcccgcctttttggcagtttcaatcatttcaaacttgtgtcgcctagccatactaagatcaaattcattgatataagttagattcattgcacgggaaagagtatcaaccaactcaagagcagagtccatcccatgcaatattgctgaaaattgccattgagaaagtaattcaatcgtcccttttatatcatcctgatgaatatggcatgcttcgtagtcttgttgattaagcgcagcaccaaaatgataagctatcgaaggatcactaaacagatggatacaacgtataccgtacgcccggaaaaaaggcgcatagttcgctgctgtagatgttccatcaacaataagaatgttattaatgctcatttgaaatccttccatctctagcttcatagaagcgggtataaacaaagaaggcagctaccaacataacaagagctgcaatggaaaatcctaaggttgtgccaacattaactgaaaaattcaaacctgatacgagtaagcctaatagtgctacaccaactgcactaccaaactgccgcatggcattaatagctgcagaagctgtagccgctttgtgttttggagctgaatgtataaatgccgaaagcagggtcggtagggctacccccccaccaatcggcattaagaaaagaaagcaaacaaaagtaagataagatgcgtcaatatacgtaagtaaagcgagagtgacatatgacactgaagctgtagccaaccctatcgtaatagttaaccgcgcaccaattaactgagataaataaccacttgcagtattggcgaatgcaataacagtgaacgttagcaaagctaaccctgtcataacaggtgagaatccacgataaacctggaaatatattgtcagcaaaaagatagaaccataaaatgagaagttcatgaccgcaccaattactaatcctagtgaaaaaattggcgttctcaacaaagcaggtgggataaatgcggcctcattattcctgacatgtcggacaagttgaatgagtgacatgaaaaacaataccaaaaacatcatatcagaaaatgaatatgccccagtcttaccagattttattagcacatacaccatagaaaaactaacaataataaaaagaagtattcctttggtatcactttgatgtaagcaacaccgagggggctctttaacataaataatggtcaatattattcccaccaagcagatcggtatatttatcaagaatagtacatgccaagaataattttccaggataataccacctaaaaaaggacccgcagcactgatgatcccgcctattgcactccaccatcctattgcctttgtccgtgacgaaatatccccttcactggctgctgaaagaagagcaagtgatgaaggaaggatcagcgcagcacctattccttggattattcgcccaactatcaagatttcaattgaaggggacatcgcacaaaccaaagacgagagcataaaaataaccattcccgtcaaattcatggctcggctgccaaatcgatcgctcaggccaccggcagcaagaagaagtgccgcaaaaattatcacataggcgtcaggaatccactgtagggaagatatatcagcctgaaatatcttagcgaaagttggcaaagcaatattgactatagtgacatccaactgcacaacaacataacccagagaagttacaagtgcagtcaacagtaacgaataacgttgtgatttcatttatcagcccaccacaaagtagacatatgcccgcctttctctttctggaataatttgcggagcataactcaggtttatcgtgttatctgcaagttggccagcatttggccccccccatgactcagggtcgctgttaagaaaaaatactgcctgagcaaatttttccggctcttttttacgcagaacttcaaaatccttaccctcaagccgtttaaggagtgcgtcagcaatatcaaagccccatgcatctctaactatggcagtaataaaactaccagcgatacgtggattaacttctataatatggattagctcaccacttataatacaatctatatgtaccggcccccaattcaatttcagtgaggcagtaaccccctctgtcatggaaaccagcgcatctatctgttgattagtcaactcaatatcagaactgtaaccacgctcaataaaacgagaccctgcacttttattttttttcatcaccccgacaaatataccatcaaagacctctacacaatactcctgtccttcaacaaactgctcgaccaatatttcaccatttggtattaactcaggagtgcttatatatatatcatccaagtatgaaaggtgagttaaaatctcgtccacagactgacacttagttataccgtgacttgcagagccttcaacaggcttaataacaactgggaattccaattgttcaaaaatagataaaggtatattttttccaatatagaaatacaccgagttatcttttctaaaacctagtttttccagggtttcaatttgatttttttttgaaacacaaaatgacactgctacgctatctgggccaggagaattaaaatgtgaagcaacctgagctgctacagatgcatacaagtcatgcgcagtagttatcaacagttcagacaataatccggaaaactcattttcaatccaaccaatgacattttctgtagaaatacgcaatgagacaaccttgacgctatcctcaaaataattaccgagatcatcatgttctgccgttaaaactgtcacgctataaccgcgtctgactgctaacgagataagatataaactggtgccagtatttctggcaccgataattactagttgcattccatccccttcttaaactgcaattttttgttctgattcaagcaactttgcgttgtaaattcgttcacccagtctactgaagctccggaatggccataagctcttagtaacgaaaattcgttgtacccaacgatatgcacgatcattattatcataacttgcttcaaactggtcacgggagtgaagcataaaattattgtttataatcaccattgtaccgggagttatgtggataccttcagcaacatcacgaatagcagaatgcagattttgtagcgcaatctgcgcctgactattaacgggaatcaccatatctggataaaaagcaacggtgagccggggcgcattcaaaggacctgaaatgatggggaccaagccggtgttatctctgggtgtaactgtcgctgttctccaacggtgaggaaccttgataatgaaggagttttctcttaatgtagcaatatcgtcatctgataggagttttagagcctcgcgagcatcagaaatccgggttaacggtttggctttagtgtcttctctcacccctaaaagcatgagtacaaaaggcgatgtatctccctctggttggtaaacctgagcggcattttcgatgtgaaaatccagttcaacagctgaccctaagcctgtgaagtcggtggctttatctttatgaggagttaaattattgactaactcttgtccttcatgagcaattgaatacggttctcccaagattgcccccatgccaactagaagattttcggtcaggttaccgcttttaaaatttctccctgtttcgccattgcgcgggctccccgtgatcccattatcaataggtaaattagtcactttgatacccgcatattctgaaaagggctttttgagattctctagggcatcagtaagttcatcgggaagcacgcgccacataatttttcttatagccttgatatactgagtgcttccttccggtgaataatgaagcccagctaacgcattttgaatcgcaaacttttcatcattagccaacgtaatcacttccagagttttttccgtgctcatatcgttctccatcacaatgtagttataaatccaacaacatagatacttgttaaatatttgtttttaaaataacaaaatagaataactatattccattttgatctaaaaaataccgaatcaaaaatatacaccagcattaaaaaccaacattaccaagctaactccatgtattaaaagtataaaataagcaaagcgaccgcacaagaaaatcactccgagacagttgacttatagaacgatcaatctataattgatggtgaatttaatgaataaaaaatattatgaggtcgtatgaataaaaaaatcggtcgtccaagagagttcaaccctgaagactttcttatgttttctcttgaggttttttggtgtaaagggtttcacgccacatcaatggccgacttaatgcaagtttctggcctagccagtgccagtatttataggttgtatccggataaaaaatcgatttttattgcagcattgagcaagtatatggaggatggattaaggcgaatggaatctcgtgcatgtgagctaccgcctgaaaaagctcttcgtgaaacactagattactgtgctctactttctacaggggagtcggggatccgcgggtgttttaccataagggctgccagtgaattacttcctgacgataaagaggtctatgacaaggtcagttatatgtttcacggcatcaaaagaaatcttctacacatcttaacgctcggtcagaaacataatattttccgaatggatacaagtgcagaagtaatggcagagagtatctttatgacacttgaaggcatgcgaatttacggcaaagttgctccagatttattgtccctccagcgtacaaattcatttattatgcaaagtgtcctaaagcccagctatcattcatttcctgtcgtcgcgggggactcttaatgtatccccccggagcacgcgtgaggcttcgaaaaagcttggtaaccatgatcgttactatggcaatagccagccaagtgcaatgtacttggtacagtaatggaaagttataccataaaacatttttagctgaggatttgttactcattgagggtatagatagttacaggggttttacctgaaataatcctgattccaaaacagcagagacgaatagcttaggaatgctgcgcttgccccgtcaataaaaaactttatagttctcttggaacgaagtgcagtttggcattgatgtcctatgaactacctcggagaatgaggaaagaactggtcattttcaattagtattaactttcaggctctcggccagtggcatcaccaagtacaccgcatcgaccgcatccggcaggttgacatatcagcgcggagcccgggcataatcctgcgaagtcggccagcgtagcgtgccggtgatcgtcagcaacagattgacgcaattatcggaaccggccagtttcaccgcgacacaactctgatgtccgacccgatgaggtaaatccgttgaggcaaactaaggggcacgaagaaatacacaaccaacagcggtaagcacttgcgataataaacattatatcttatcgtaatatcccgtaggattgcgggaaccactgctaacagggaatattgaggggcaacatgttatccattaaaaaagctatggcatgtgacgtagttctactcgcagaaattggattaactgcctggcaaaagggattgatgcctcatgtccctcctcggataaggaaacaatttttaagagataatccattcctatccttcttaaacaccctgggttcacgcgttttagttggatacattgataacaggccagtagggtttggggcttgtgagggctgcgacgatacaataactgatatctgggtggctcctgcctttgaaggtttgggcgtagcttccgctattattaatgcgcttgaaaacgaaatcatagaacgcggttatagccatgctcatatccaggtcgcagctgctaacgaacgtgcccatgcgctttacacgtatctaggctatagagaggtatggagaagaaccgagtttgacatcattctgaatatcaacctggaaaaagtcggcctgacgaaaaaactaaaatacttatcacaaaaaccagccaattgaccggttaaacgcaggttcagaatcccgattacggcgtccggaatatgtcatagttccgccaactactcagcatatacctcactgatacgcgggttgcccggtaccggtgtccttgccaaacaccggcagcaggttagccatatgctgcacaaaggtcagccgactattcgccaaacgccgttaagcctttcgtaacatcatatccaatgttaacaccagcaaatttcttttcggtgtatgggttatgcagtcacaacggcagaggttaaagcgtttctatcatccggcgtaaaagacgcactcggggttcgatgctggacaactccagatattctgccgggctatggaagccagccccaattgggccaaaaccatccagtgagggaatatcaagcgcggcggtatggttggcatcagaaccgccaccgacggcctgccagcgaacgtcaatattctccaacctacccgcagactccaccttcgccatcagctgttcggtttttgctgagggtgacatggcgggcacatgagcctgtaatgtcgcattgaggcgaacatcggcagtaaagcagtgaggcgtaggggttcgcattagccgatcgacacgctcaaattcgtcgttctgccagaagcggacatccactatcgcttgcgcgtggtccgcaactacattggctgcagaacctccactcaccactccaacattcagggtcgtccccagttgcgcattggcaaactgattaagatgaagtatccagtgggccatttcattgattgcggaacgcccattatcaggatcgttaccggcgtgggcggcgacgccgtgaaattccagctcgtagcgggccattcccttgcgagccttgaccagtgagccatccgcacgggcggcctcgcacaccagcacgcagcggctgcgtttcgccagtgcgccaatccattcatgtgagtaaaccgaccccgtctcctcatcagggttcatggcaatcgcgatagagagacgttctttcgcctctgcagacagttcccgcattgcccaaagaatattaaggagcccgctcttcatatccgccacgccggggccataggcgcgatcctccttgatgctcatggggcgcgtcgctacggtacctaccgggaaaaccgtatccaggtgacctaccagtagcacatcaaagtgtggactattgggtttgttggcagcaaaaacgccgggccccactttatcgccaagatcgacaatttcgctgtgccagccgagctgctgatatttctcatgcatattgccagcaacggtggcaactccgtccagcgtattggtaccacagtccacattaaccaaggaggccaactctgccagatagtcgtctaattgcatggtgtttcccctgttcttttgtgcaagctgcgcatgcactgaaattaaatcaagggagagtacgatctcgcactcgccccgcaggtcgtcgtgcctctagataaaaatgtgcatcagcaacatggcaccgaaggcattcagtaccgagatggctatcatcaacgggatcagtttggcgttggtgccaatgaccccaaggatgcgtccggcatactggatctgggaccccatcagatagatggccggtgccagaatagccaaatgttctccagtcaggatcccgctatcgaacaggctgacggctacgccaatcccaccgcccattgacatccagcctccgatcaggaccgctgccgcctcgcccggcaagccgaacagctgcatcaggggagcaaaaatgaaagccagcccgtccagtgcgccagtaatggtcagcgccttgatcaccacaaaggccatcagaacattgggcaaggtactggttgtggcaatggtccagcctttgcgcgcgccagcaacaaaaacatcggtgatcatgggtttggattcagtcgtcatgctcatggtgctctccctatgccttatggatttcagaagatgcgttatcttgacgacgcattttcagcaacaaacgaaaaatattcgcgccaacgattttcataaaaaacatgacgaggatgcacaggccgatcgaggcgggaacagccagggtgccgtcagcggcaaccaaagtgaacagaatggcgccggaggagaaaaagttggtgatcattgcgcctgcagaaaactgaaacatggtgaaaacgtctttttcattctcagtaatctgcgcctcatcagccagcttgcgcgtcagcgaggcaccaacatccgtgctctgcaagctgccgatcagtgccaaaccggtattaccacgcagtcccagcaacgggcgcaacagtggggttaacagtttacgtgctgcattcagcgcaccgtagtgctccagtacattgatcatgccaagggcaaacatgacagcaggtatcaggccgaaggcgaagagaaaaccatccatggcaccattaccgccggtaccacgaaaggtactgttggaaacgtttaatgcctcgttgctttgagtcacaccactgacgactcgtccgaaagacccgttcaatgtcgtgaaatcaaacacgccataccattctttaccgccgagaagcccggaaaagaataccatggcaaaaagtagcgccacgtaggctccccagcgaacgggagccatttctgtagcagaggaggtaatattttgttgctgtccgctcatgttatttccttatcagagtgtcacaaaataacccagtgccagtcataacagcatcggcttatgaatagtctactgtgtgtattttttgttcatgcgcatcctgatggcgatcaataaatcctgcacaaaggaaaatttaacttataaaacatgacgttgttggcattttattctgtcccaaataacgatttattaatgaaatcatgacaaaatatgtgtagttattaccgaatgtgttcacaacatggtctgatttagtctgctcatagcattgccaacgggtgcattacttgaccaacagtgttgtgatttttttattaatttttaatgttttattaaattagcagactcataattagagcttgcattttcgcctgagcttatgcatcgatgtgggtcggcataagttcctgcgcagaaaaaaagtcgaaaaccagcatcagggaataaatgatcttatctatatgatgatgtgacaagattgccgctgatgctggttagatattgaggattatggagacatagtattctatttaattacctttagctcaccgcccaatcagagctttgcacctttttctacatagctcatatcgcccagtttacctacggtaaattcacggtttttataagtaatctgcgtaacgctagcattagacagtggcgcgataatgggtgtagagttcatatccgctaccatggccagaatagctgcgccatgtgaaaccaggagtacgttaccgcccccttgagctgccgtttcctcagcaatagtttttagctctgattgcatacgtgctttgacggcggcaaacgtttcagcctcaccgctggtatcgaccagagcaacaccgccgaacatcttggcaaatggcaatttccctttggcaaaatcaccgaatagcgctttttccgactcatagccaagcttggtggcgattgctccccacatattggcatcgagatcgccttcgtaaataccgaagcagaactcacgcaatttctcgctttcaacgatgtccaactgctgcccttttgcggctaatataatacgtgcagtttgacgtgcccgccccagatcgctggcatacacctttttgaattcaacatctttcagccccttgccaagttgttcagcaaccgtaacgcctgcggtagtcaacggggtatctgcccaaccctgaacccgatgtacggtattaaacatggttttcccatggcggggaacataaatggggactgtattatcaccgactgtttcagcgtaagccaagagcgggctaaaaataagtgaagacaatagagcaagtaatagtgaaaaccgtttcatggttatttcctcaatggttttagtttgtattattgttggtcttccgtagatggatcatatatccccctacatcagacgaatagttttaaacgcaagcgggttataccgtacatcaggctagccacgttttattggtcactcactccatcaataatttcttttgctggtcgttcatacctcatcactctctgtcgcgttgccggggtgccagcctgttgtataagccgatcttgaggcaaaaaaaaacctaaacctcgggtgacgtgctaactaatagccaacaccacccgaggtttaggttttgcctgttaaacagtaacaatcctaatttacagtccaatacgctaacagtttgataaatgaatgcaagaactcaaacctataaaagtagaaactgtgatcaaattaacgctaagctgttttacactggccaataagtcttaaccaaaagctcccaccaggcagagaggatcacatgaaaaaccagcaagtaagcttaaaaaccatcccagagccgcaaaaggactgcactggcgtgcccgttgcgctaacggatgaaaccatccaacaaagaaaaaacaacatcctcagcaggatgaagcagcgtgggcttgatcaactggtgatttactgtgatgtggagcacggtggtaattttgaatatctggttggctttttcacccgctttgaagaagccttattgattatcaacgccgatggcgaaatgacgctagtgctagggaacgagaatctcaataaggtcagcaaagcgcggatccaagccaaggcggtacatctatcttaattctcactgccaaatcaacccggcagaagcgataagtcgattaaagagctgctggttgaagctggtattcgggaaaatgcccgcaccggcctggttggctggaagatgtttaccaacgggcctgaaatcgacaagaaaatctacgacctcccgtcatttattgtcgataccctccgtaacattgtcggtgatgaggcctgtttatccaatgagaccgacttgtttatcggcgagcatggggtaagaacggtcaataatgccaacgaggtggctcactatgaatatggtgccgcattagcctccgattgcattctggatgccatgaataagctggccccgggcgtcacagagcaagcgttaggggattgcctggtgcgctttggccagcacccgagtatcgtcaccattgcttccagcggcccacgctttattaaaggtaacctgttcccaaccgacaacaccgtgaagtacggtgatacgatctctttaaccgtaggctatcgcggcggggcctccagccgggcaggctatgcggtcaatgctaatggtgagttatcaacagaggcgaaaaactatctggatgcggtcgccaagccctacttctcggcctatgcccactggcttgaagtgattagcgttggcatgcgtggcggcgatctgtttgatcacgtggaagcggtcctaccgcgctcaaagtacggttggtcgctgtgtccagggcatttgaccgctgaagaagagtggatgtcttcgcccatttatcaaggctctcagcaaaagctgttgagcggcatgatcctgcagattgatattatcccttcagtgcccaactttggtggcgtttctgccgaaagcaccgtgctactggcggatgaacagctcaagttggagatccaacaacagtatccacagctgtggcagcggatgcagcagcgtagaaaatacctgatcgaaacattggggataacgctgtcagcagatatcttgccgatgtgcagcaccgttgcctatttgcgcccttatttgctggacaaggacagcgcttttgtctgccagagctgagcgccccgccatatcgcatatggctttggcagaaaacggcaacgattaaatcaggccaacaaagtgtcaaaggctaacgaaaacagtgcggtgtcataagatgttgaggcgctggataatacatattcccccccaatgtcctgtgagtacaagtaccaccgtttttcagcaacatcaacggttaagccattggcaaaagggtgaggtaaggtaaacgtggtcggagataaagcaaaaccccggccatccgcttttatgatggcttctttcaacgaccacagacgaaagaaatcaacgttttcaccctgaacgagttgtgtaaactcctcaggggtgagcacatcctggtagtcacgtatgtcaatggggactcttttttccacatcaacgccgatatccccctgcgtagtataggcacatacggcccagtcccccgcatgggaaagattaaacccccctttcattcccatcacagcaggcttgccatagcggttatagtgcagcctgggaaaatgacttccctgatacccaacatgtttttttaatgcataacgtagcagcattctccccaataatgaccggcgtttatcgtcatcaaatctaaaccgatcgaataagatccgttggtctctatcaagataatcccgctgcgaataaagcagttcgctgcttagctcgtcaatacgagagcagtagatataattggtcatgttctttaacccttcaccgacagcatgctgggcaggtaatagcccccctgcccagcgccaagaaagaattagcggatatggctaatcaactcatcctccctttctagcaaggtaaagtgactggctgctatttcaaacagctgtagttgggcgatattttcaacaccagtatcaatgttgttaaaccgatattgctggtattcctcattatctatctcctctgtcgccttaaacagcacgatctgcgtatgttttaacacggcagaaagtggctgtgcattcaacaccttatcgcttatggcaaccgattcgacattatgtcttaaataatgtgggatttgtaaccgctccatcatagagtccaggttaaaggatgaatcattacgcagataatgatcttcgcttaacaaccaggtatccagcagatagacagtgatcgccttaaccccacgcgcttctaaattggccgcgatctccagtgcaatcttcccgcccaacgaccagcccaataaagtgaccggctgggtaatatcaagcactcgatcgatatgctccagatagaaacgtgccaattcatcaagccgctcgaccttctgctcgtgatagaagttatatgagtcaaccccataacagcagtaacgctcactcaacctattggccaaggattggtagaccgaacagttccccatcccagggtgaaccataaacatctgtggtttttgcgttaccgtactaaatggcactatcacctcaaaggacttcccctgagcctgtgcaatggcttgcgataactcgcttagggtgcgcgcattgataatatcaagcagacgtattttaaccctcagcacctggttaatccggttgttcagcctcatcgccaggatgctgttgccgcccaacgcaaagaagttatcctccatgctgattgcctcaaaggaaacttgcagcgtatcggcgagtaattcacatagcgttttttcaaccttgttttccggtgccacgtaggtcacggaatgggttatttgcggctcaggtaacaaccttctgttcagcttaccgttggaggtcaccggcagcgccgtcaaatgaacaaatacgccaggtaccatataatctggcagggtttcccgcagatgagcgcatagcttttcggtggaaatttcctgcgcggcaacataataagccaccagatatttatcgttgctgccacgctcactggcgatcaccaccgcatgattaacgtccggataactggccaggcgcgtttcgatttctcccaactcaatacggtaaccgcgcactttaacctggaagtcattgcggcccacntcctggaagtcattgcggcccagatattggatattgccatcggctaaatagcgtaccacgtcgccggttttatacatccggccattgtaaccccgtcgcttttcctcactgccctggaatggattactcaggaaaaccttatccgtcaatgatttattattcacgtaacctctagcaacaccgacgccaccaatgaataactcgccaatagcccccggtggaatgggttgcatttgtgcattcagcacgtaggcggaagtattgtcgatcggcttaccgattaacacatccttgatggagcgtgcgttacagtcgtagaacaacacatccaccgtggcttccgttgggccatagagattatggatctggcaatgcggcagtaagcgctggcattttctgacttcccccacgtttaacgcctctccgctgcaaaacaggtagttaaggctgcccagttttgcctgcaacgcactctgcccttccagggtttcaaggaatgccgacagcattgaaggaacgaaatggagcgtcgtgacctgttgctgttcaatcagttctgccagatagacattatctttataggtctcctgcgaggcaaaaacggtacaggccccgaaccagttagcccagaacagctcccacactgaaacatcgaagganagtagttggtcttttgcaagatacgatcctgcgccgtgatcggatattgcttatgcatccagacaatacggttgatcacgctgtgatgctctagcatgacgcctttaggattgcccgtggtcccgctggtatagatgatgtaagccaaatcgctagaccgcaccgatgaaggctggttttcgcctgagtagcgggcaacgtcagctgaggtttcccgatcggcgatatcaatgacggttctgccggttgctgctagcgctgcggctttctcatcgccggggtgtgccgtcaagatgatatcgataccggcgttttccagcatgtagctcacccggtcatccggcgccaacggatccagtggtacataagcgcccccagccttgagaatggccagtatcgcgacctgcatatgctcagagcggtttaaacacaacgccaccagatcgccagtgcggacagcaaagcgttctctcaagtaaaccgacaagcggttagcccgttcattca

SEQ ID NO: 193 - DNA, 441 bp, unknown
  Altogen  635822 strain
  misc_feature (146)..(251): n is a, c, g, or t
  misc_feature (329)..(414): n is a, c, g, or t
gccatctgcgccggtgtcaaaattccgcagcgcagcaacgcggcctggtcggtcttgatccagcgaccaatgaacaatgcccgcggctgtggcacctgctggtagtaaagcttcgcggcctcgtactccggcgcatccatcccgannnnnnnnnnnnnnnnnnnnnnnnnnnnnnnnnnnnnnnnnnnnnnnnnnnnnnnnnnnnnnnnnnnnnnnnnnnnnnnnnnnnnnnnnnnnnnnnnnnnnnnnnngtattcaccgtcacgctgacgatgttagatacaggtaaaccctgtgacatggttattctccgaagaattgaaccggtnnnnnnnnnnnnnnnnnnnnnnnnnnnnnnnnnnnnnnnnnnnnnnnnnnnnnnnnnnnnnnnnnnnnnnnnnnnnnnnnnnnnnnctgctcgctgaggaactcaggaaccgc

SEQ ID NO: 194 - DNA, 313 bp, unknown
  Altogen  635822 strain
gacgctgggtgaactctgtcaaagcctggccgacgcgcaaaaataaccctatgactaaacaatgggtattagtgactggcggtagccgggggattggccgcgcattggtagaagaactggccaagcaatggaccgtggtgttcccctgccgtcacgctcagtcggccagcacggcggtgattgaagcctgctcgggtttgccgggttgggtggaaagctgcgtctgtgacggcagtgacgagcaggcggtgaacgttgtggctccgccgttgctggcacgcctcggtgcaccttttgcggtgatccataacgc

SEQ ID NO: 195 - DNA, 5740 bp, unknown
  Altogen  635822 strain
  misc_feature (2568)..(2620): n is a, c, g, or t
  misc_feature (2946)..(2946): n is a, c, g, or t
  misc_feature (3072)..(3169): n is a, c, g, or t
aaatagaaccaagtcaggatggactgataataacgtcaatttctaatgaggttgagattgaacggttattattggaggtggacgatcacccgcatatcggcatggactggatacaggataacggtgagctgtatctggcgggagactggctggcgcagtgcggacttaccgggcaaccactggcgatcagcgtaatgcccggcaaggtggtggtccaggtttaacagagttgtatgtgcactaacaggtaacaattagcaggaatgatcctgatagtatcattccataccagaagaaagttaaccaacactctcccttttaactaatcttccatcattaagtgtcagatagtctcttttatctccatgtgtgatctccacatattcattgaccacaactgcatcaacaattccacagaggtaatgccaaaaagactttttggcattattataaagaagcactccccactcacacggaattaaatagcaatcttcaggaagatggataatatcatacacaataccaccaagccgtgatatctcagaacgagcgtcttctgtaaaaactattaacccatcatctttttcaccttgagatgcattacaatctggacatctttccagatccgactcatagctagaataacaattttgacatgtagtatatttcatcaaccatctcttatttaattggaatactagatgtaataacacctggaccagtaccaccaatatgcggatcaacatggtctgtaataacacgtattttttgtgttaccccattttgggtcgatgtgccttcaaataccttaccaaagaacccctccctattagaaatgacttgatttgcagggttattagcaacctccactgtagcatgcgcaatatctcgattactccactccgatgggaatggcgaacctttttgccttttaggcttcattgatgcatatggttcttgcttaggaggaccaacatgaggagagtgtcttcttaagatatggcgtagtgagccaaaagagaacttatagccatcattacctacaggaggacacgtcgctagtccaagcggatctatccatcccaacgggttatgtacgtaactatacggattcatcccccccgccagccctatcgggtcataggaacgatcccgacgtcatcgtactttttggcacgctaccgcccgcaccgttactggcttcccggctagaacccgttactcttttaacatctacgcaacacgacagccccgacgtgcgttttttcgtcttcacgcagtataacgacaccatcgactcccgttaaccccttgttttcgttactgcgtaacgctgggtgttccggctccggccacggcactccggcagccccaccgccggggtgacggggccggattgcgggcgcgggtggcatagaacccgcaagcgacgttctgcggcgctctgatgcacggagattgagggggaggcaaggcttgcatgaccacaccgtaccagggtggggagcgtgagctggcgagacggtaaggagtgacctgcttcttcaccgcagggcacgacccggcgtagccagattgcgctgggcgggtatcaacgctttcagcggaggcctttggccgacctccccttggccgttgaccttggcacacgacaccgcactcaccccgccagggatggcggcacaccccgtcgcccaggtgagcaccgaggccaacagcggcgggagtttacgagcggcgcgccacacccggccaggatgccgactgcgggggcgcacgacataatgcggattatacgttgtaagccacacacagcggctaaggcaggaacaggtggcgggcggcgcactacgtataatccccccgcattatgtttaatggacgcaagccgggaacccagcatgcagagaacaccgcagcctaaccccggtgcgcggccattaacccccgcacacgccgatgccaacacaggcaggcgggagccagggagggcgagcggctgcctgggcaccgtccgccgatctcaccggctgcggacaggctgtgccgtgcaaggatgcactaatgtcgtgagcgcagggatgcgcaggaacgacgccgacgacgccgggtttcagctcggctcctggctgtccggcggcgcggcctttttcggctgcaccgcacgttctgccgggtgcgtccgctcatgcaccgctttcagtttccctatcgccacccgcgtatacacctgggttgtctccagcttctcatgccccaggatcgcctggatgtgtcgcgtatccgcgccgttctccagcatctgcgtcgccatcgcgtgccggaacaggtggcaggctccggccttgtttagctgtgcatcctcccggatcgcccggcccgctatctctgtcagcgtggcacgtttcaacccggcgcccttcaccgtcacgaacaggtggccgctgtcatgccgctgcgtcagttggggccggactgcattcagatagcgctgtacccaggccagcgcccgatagcctaccggcaccacccgatcttttcgccccttgccctgccgcaccaccaacnnnnnnnnnnnnnnnnnnnnnnnnnnnnnnnnnnnnnnnnnnnnnnnnnnnnngcatttcaagcaccgcgcggttacgcagccccagcagcgtctcatcatcctgcgccgccagcaccgcctccatctcctcttcactcagtacctgagccggtagtcgtttctcggccttcggcagcgtcatctgctccgccgggctgtacaggatatggtgccgtttcaacagccagcgcaacagcattttgatggccgagagccggttcagttgtccaccttgtaccaacggtttgccgtccggcttacggtagctacgcagataccgctggtaaccttccagcaccaccaggctcacctgcggcgcggtcatcaccccgcgctgnccctgcggcgcggtcatccccccgcgctgctcgcaccaggtcacgaacggcaacagccgttcctggtaaccctccagggtgcgcgggctataaccactggcgtccaggtggctcagatacagcgtnnnnnnnnnnnnnnnnnnnnnnnnnnnnnnnnnnnnnnnnnnnnnnnnnnnnnnnnnnnnnnnnnnnnnnnnnnnnnnnnnnnnnnnnnnnnnnnnnntggcgtaacgtggtcagtgctgaagggggcttcatggcgggcgctccttgccgggatagacggtagtgttgaaggggctatgattacggtatcggggacatctttcggactggaacagcatttaaggcactgactcgacttgcggcccgcaagcacttgtccagcaaggcctgagcggattttccctccccagacctggccccgacctggggcagacttgacctcgacttgctcgctacagacccagacttgcggatatcgtagtccaggtttcgtcgctcagacgtcagtcccttacgggctgtcgcggatgcgattggcgttatgattacgatgtgtcggtttttctttcaccggaaccgtatttttgaccctgccgcgacttgccaccggtaaccccttgtccggcctggcctgagcggttttcaccttcccagacttggcctcgacctgggccagacttgaccccgacttgctattcattgacccagacttgcgtgagttatattcctcttttttagccgcttccggcacatcgatcagcccgcacaggtgcgcaccgtctggcgtctgcccatcccacagcagttcgtactgcaacaggtggccccggctaccgccgtggatcaacaggtactccatgtcactgagccgctgacagtgcagtttgagctggctgtcactccagttcgtggcgttgcggatatcccgccgcgtgaaccgcacctcacctggttgcctgttctgctccagcgccagctgcgccaccatgccctgtatcagcagcaacagcttgcgcgtctgcggtggcatctcgtccagggtgcgccccaggatctcatgcgccagttggttggccaacgcgatatcctcccgcaccacctcgatgtactcgatcacctggccccgatgctcgatccgcttcacctcccgctggtactgatgcagcagcgctatcgattggatcagggtcaggtacttcatatggtcgcgccgggtgcgggttttatcgctcatgaacgtgagctgagaggcgaacggtttgaccacgttcagcggccgcagcagccgctgggcattctggtgcagcgcggtgaggtagcctttttcgctctcggccaacaagccttccagcgtctgggcgtaacgctgccgggcatggatcgcctcggtctgttcgcgggactcgttcaccgtcagcaccaggcagcggtttaacagctcctcgtccacgtcgatcgccgtggtggtcaacatcagcatcaccggccccttgacggtgtattgcttggtcaccagattacccgtcgcctcgtccttgccggtgctggcgatggtcagttccccttccgactgcaacagcttgagcgcataggctgcctgccgcaccccttcctcttccgctatcgccaggatcttgtgctggagattggtttcacccaggtagtacaggctttgcccggtcatcgccgagtattgcagccgttcttccggtgggatcaggttcagcaccgcgtccatcagcgacgacttgcccgccgcactggacgactggatcaacaccgccagcggccgatccagtttgcgactcaccgcagccaggtaacccgccaccaggttggtggattcccccaccaccccgcaggccgccagatcggcggtgatacgcccgatcagatccggatcttgcagcaacgccagcgcggccgctttctcggtgtcatccagttccggcccgccgtcctcgggttctggatcgttctgctgttgttccaacacccacaacacccgccccagcgcctgcttgagctggccctcggtcgtccccagctcggtggcggccatccgggcataacccgcccgactgcgggcgctcatcatgtccacgctgtccgcgaacatcacgccgctaaccgtgtcgatcacctccccattgattttcacccccgccgatccggccttcacctgcgccagtccccggatacgccattgctgccccggcaagccgatctccagctcaccaccgggcaaggtttccaccaccacgccaggttcagcagggacagcggctaaggaaggcaccgggtcaggctccagcttttcatgctgatacgcggccagttcggccacctcaacggcctgcacaggctcccccatcggcaccgccgactcgagcagcagccggaaggccatgtccggctcggccacctggcacaggtagccattggcatccatgcccgcagggaacacgacccggaacgcctcgacacccagcccggcaagccgggccgccagttttaccgccgcgtcattacccgccgcgtcgttatcgaaggcgatcaacacctgtttggtgccgtactgttgcagcgcttgcgcatgggccgccgtgaagccgttcaccccgtaagccgccgtgacattgcgatgaccggccacccagaagctcatggcatcgatcagcgattcgcacaggataaccacttggctggcctgcaacgccgcttcgttccacaccccgccatgcgcccccggcagatacagatgtaacggcgttccactgcgtagccc

SEQ ID NO: 196 - DNA, 975 bp, unknown
  Altogen  635822 strain
  misc_feature (849)..(905): n is a, c, g, or t
ttgaggagcctcgtgatggtttgatgacggcggttggccagtgcctcggcagtgtcacgctgctcacgcaacagcacctgttcccgctcgttactgcgggcgcgggtctccagttcagtgagcgcgtgctgcgaggcttgcagcgcttttttttgctttccgatggtttgggttgcgtcggacagtgagcgggtcagctcgcggttttcccgccctatccaccacaccgccacgacggccagcatcagcaacgtaatcaacgttttcattgcgcccccgtcatgcacagcgtgcgctcactggcgcgccggttggccagcccggcagacttcacgccattgacgtacacccaacgcgggagctgattgcacgcctgcggccattgctgctgattgatgaaatgcgccagcgtggacttgcacgccgccccggtgccgacgttaaaggcaaagctgaccaccgcgtcgtaaaccggctgcggcatggccaccggcatacattgcgccagcctgcgctcaacctgcataacatccgccaccagattggcagcggcatcgcgctcactgatggcctgccccggcttgaccccggcggtgtggccaataccgctcgtccacaccccggcgctgcactggtacggactcaggcggcgcccttccaggttggcaatcaactccagcccggccagagaggtacgcaactggctaaagtcgggcagcagcacagccagcaacagcaccgccgccacgctgcaacgcttaacgattgagggcatcgataacctccttttgaacaccggcacgcttgagcaacagatagcttttccggcggtaataccagttgatggcnnnnnnnnnnnnnnnnnnnnnnnnnnnnnnnnnnnnnnnnnnnnnnnnnnnnnnnnnacattacggccacggcataggcaaagaacgaggtgattttctccatgcttaatcccatagctgaacggtt

SEQ ID NO: 197 - DNA, 49408 bp, unknown
  Altogen  635822 strain
  misc_feature (67)..(159): n is a, c, g, or t
  misc_feature (49234)..(49307): n is a, c, g, or t
atcagttagttgcagtggtatttatttaggttaatatcatgcgctgttaaaagtaaaaaaatatttnnnnnnnnnnnnnnnnnnnnnnnnnnnnnnnnnnnnnnnnnnnnnnnnnnnnnnnnnnnnnnnnnnnnnnnnnnnnnnnnnnnnnnnnnnnnnattttattcattgatttcaggttaaatttgttgcccgctcctggctggtgttgaactatgaaccataaaaagtcaggggcttaaccacattcatgtctatgtaataagtacgttaaaaacatttcataaccaattgatttttatataaaaatgtttttaatattttcatgtggagattaactatacttaagattaagaaataaaactcattattttcactataggcaattgaaaatgaaagaaaatttcataatcaatgacacggtagtctataactcagagcagcatcggttgatacctacagggattaggggaaaagaaacggttttaaacgttccttcgagtcgttgtttacttttgttgctaaagcatccaggcataagtattgaacaacaggaattttttagtgatgtctgggaaaagcatggtcagtgtgttactgctaacactttttatcagaatatctctttgataaggaaagctattcgtaatgcagggataagaaattcagtcataaaaaccattcctaaagttgggctgtgttttacaggaaccgttcagattatagagaaagaatgctctagtgttgtgtgtttagagccccaaactgatgatgtcattcaagtcatagacacgaatagcgaaaagccggcagtaaaaacaccgttgaattttttttgaagacgataaatggtaccgaggttatcattttttcattatttctatttgtctgcatcattctattaacttcagggtactcgcaaagtgcccgtttttttgcaacacatgataaaatcgcgaataaaaaccaatgctctatttatgtggacagaaaagatttagtgagcaaccacagtaaatacattaattttctgaatgaaaataaggtggtttgtagcccacatgagtttatatatgtcactaaagagttatcaacacatgatacgttgattctcatttgtgagattcttgaaaaagaaaatattgagtgtaccactcgttttaagttttctgatatcaagtcgtagtggatcagtaatttcggacatctcaatagcctgttaatgtcacaacagaaaattgaggtaatcaagtcatgacccaacgcaaacaaaccaaacgccgcttttccccagaattcaaacgcgaagccatcgaacaggtactcaaataccaacagcgtgctgttgatagggtgagagaggccattaaggacggggtttttaaaacggtagctcaatgggcaaggcactgctccctctttgcactgtgaggtctgaaggttgttggcgaatggcgtaggatgtgtcctccatgtactgttgcttgagtgcctacccaggcttccctgtgtggggagcggccttcccgttctctgctattttcggcaaaccggcaccctacctcgccaaacaccacatgcagtggcattatcagtctatatagccactagatgttgtgttttagcatgagttggcccgacgaaaaatatgctgtaaaaatcaccagacatgattttttatggttaatttccagaagtcggaaacgatccgtgatccaaaaaggagcttcatgacgaatttataaaaatacaggcgacgggatttttgcggataatttggggtgacgggcgagcggtatcggggtgcagggcaaaaaagacgcgttttaggataaggtagcgctacgtgaaatctgaacgtcgatgtggggcgtaaggcgcaaagattttacgtagcgctacccatcgaaatcagagatatgacgcgaggagaaatacacgatgggacaggatctcccccctgagcaggcacggtttgccgtgctgttgaccgactatccgcagatttccgggtactgggactttgatacatggagatgtcatgaaaacgatttgcgtacggcactgaatatcatgagcagcggcgaacggcagttggcgctgttcttcctgtcgttgtggaccggtcatgatgaggggtttgacatgctggaggcggcaagtgtattggatgtcaaaccacgtcagctgttgatcaattggctacgcgatcccttctgaccatgatacatcgtgcaagttaccggggaggtctggccaccaccggcacaccgaatggccaagaaaccctttgctggatacgcgggattatcagcatgcaatagcgcaggtttacgatgaactgcagcgctatttgctggcaccggaagtggccgccctgcttcactatctgcctgactggccacagcatgcactcattaatttactgtgaaacacaggtacccggatcaatgaagctctttcgctcaagcggcgagacatacggctcaccgttgagatgccccgtatcattctgcgtaccgccaaacaacgacgcggtggccacggcagtcctgccaagggtaaatcggccaatcggctgggaccgctgaccgatccgcactttgtcgacgaactgagacgactgttcgccagtaccaaggaacagtttgagattgatacacaaacgggtgaacgaacacccttgctgatttggcaaacgaccgatcgtacggtacgcaactggctcacgaaagccgaacgagctgatgggccacgaaaaaggggaaagcatggaagtgtatacccgggtgtttgcactcgatatcgtggccaaccgccaggtgcagttcactctgccgacgcaggatgcgatcacgatgatacgggagcctgaagcgtctgctttgcttcattgcagcagaaatttctctaaaatcagttttttacgtaaaatattgactcaaactgagcactaataagagtcatttcagtatgttatagcgatacagtagcgttccaaaatcttgcctcatgctgacaaaaagcaatatctcgatattcttgccgtcaaaatcgtagagcacgcgatactcgctgtcgacatcaagcctttcacgcagcatcaacccccgatctgagaggtatacgttaaagcgatatctttcaggatcctggatgatgttagcaacagactccatcaggaggttatcaacgaagttggctgcctgttgcgccccgatagtcccgcttttgtaggattcaatatctgccaagcactggtgcgccaaaggcgcgaaggcgattgaaaactgcaatacttcctttttaatttctggcggcacgcaacctccccaagacttcttcaggggtcatgcctttaccctctgcgatttcttttttcgcttgcatcgccagtttaaaaagggcgtttatattccggtcttgctgcatttctctgacttcggcctcacgttctgcggcggtctggataaacagttctgcaacgccgttttttgtcacgtaaatccccccttcaaaagtttccgcatttccaagactgtctctggcgagtttttgggacatggtttgagtcatcgttttctccacgtaagatgagatcccttggcgagaacgatcatctcgcctcaggtcaggctttgcggaataacaccgcagcgttcttgcttgcgcatacgcgtaatgcgtgttaataggataacacgggtgagatttaatcgtgtacatatttgtacacgattaaactctgtcacacgaaccccggaatgttgataaacgcggagtttccgtttttgatcttacccacgaacaatcgacacacagctaagcgaggttctggttttcaaattgttccgggctaagaccaccacaggcactgtggcaacgccagcgattgtaatcgcactcgatataattaaaacacagtcgttcgcattatttcccagcaggcaaagtgctcaccgcggatatattccaccttcagcgagtggaagatgctttcagcacagacattgtcgtaacaacagccttttgcgttcatactgccacgcagattatagcgttgcagtaaggcttggtaagccactgaacagtactggccacctctgtcacattttccgggcgcttacgccgccacagcaccatctgcaacacatcgcaggccagttgtgctgtcatccgcgatgacatcgcccagccgatgacggcccgagaccacaggtcaataactaccgtaaggtaaatccagccttcgtctgtacgcaagtacgtaatgtcacccgactatttctgattcggctcacaggtggtaacgtcctgcttcagcaggttttcagacaccggcagaccatgttcacggtaactgaccaggctgaaccggcacgaggcctttgcgcgcagcccctgacgacgcaggctggctgcaatggttttgacgttgtatgccggaagctcatcagcaagacgcggcgcaccataccgctgttttgcatcactaaatgcctttcgaaccgcatcatcgcaaacaagacggaactgctgacgtgggcctggctgatgacgacgtagacgccaggcataccagccgctgcgagcgacacagagcacccgacacatggctttgatgctgaattcggcctgatgcttttcgataaagacatacttcatttcaggtgcttcgcaaagtatgtcaccgctttttggagaatggccatttgggtgacggatgttttcctggacggatttattgtgttatcccaagttcctgctcacgttcggaaccggacagactctgctattgcttgctacgcgaggtttaaagttgcgattcgtagagaccgagttcacatgcggcggcagccacgccaatacgttgagcgagcctaagcgcttcgttcctaaaggtgggtgagtgttgtttacaggtttttttcgttgctgatgatttagttatgagtcacctctgggttaagagtttactcacttagcgccatgtccactattactgggtaagatgaagccccttagtaacaggggctttttactttctgcattgggcaaatcacacgtagctaagcgcaataccgatgaacaacaccaaaccaacgtagttgttattcaggaaggcacggaagcaggcatcgcgctcgcggccagccacctgcttttgctgatggataaacagcgctcccgccagcaacagcgaccagtaaaacgcgcctcccagttgcactagataacccacccacagcatcagcaacagcgtagcaaactgcaacaacccgacgatcaacttgtcatggcggccaaacagcaccgcggtggacttgatcccaatcttcaaatcatcatcacgatcgaccatggcatacaaggtatcgtaagccaccgtccagcagatattggccagaaacagcagccagcagctcagtggcagcgactcgctgacagcagcataggccatcgggatcgaccagccaaacgccgcccctagcaccacctgtggcagattggtcacccgcttcataaacgggtaaacccaggccagcgccagagccgctagcgacagccagatggtcatcgcgttcaacgtcaacaccagcgcaaaggaaaccagcaccagcgagacaaacaggatcttggcctctttttcgctgacgcggccgctcggcatcgggcggccagcggtgcgtttcacatgcccatcgaaagcgcgatcggcatagtcatttaccacgcaacccgcagcacgcatcaggaaaacgccgagcacaaacaccagcaataccgacggcgagggaactcccccccctgccaaccacaatgcccacaaggtaggccacagcaacaatagcgtgccaatcggcttatcgatacgcatcagatggcaataggcctgccatttgctttgaatcacgctcccttccaaagttctttctcccctaattatgccggagtgcccttttccaccgcatacagtggagaggccggtagaaacagttccgtcagtaataatggttttcccgccagacgaagacgagaacgccgcgcccacagatccttctgctggccaacatggatatagtcacgagtcaggctttcactgctgaacagataacggcccagtggcaacgtccccagatcgaccaacgccagatccggcccggtcagtgtttcctgtgggatcaccgtacgccccagcagccaaggctcgccgccacccagtaagacgatcccacccagccaatagcgctcgctatgtggcagatgaactgcctcttcggcaagctggtcacgagtgatgaagcattcacgctgaggttctacctgcacgcggccacagtggcgctcaaaacggcggggcatggaacctaaatccatcagccaatcgctaacggcggcaggtattgaggaatgttcagacagccactcaataggcggcaggatgggatccctattgccagacattttgctactccaggccagaggctgcgtgccgcgccaagccatacaaactgttaacagaaatccattgtaacgcagaaatgcaaaagcggcaggcagattcgtgacgtaacgcgccccccattatcagggggtaaaacggcaggctgccgtagtggaagatatcataacgcgagggagttcgcgctgttggcgccaagcttgagcaagaaagcccccgcctgctggatgtaagtgacttgcagatgaaaaaaggtgcgccaaagcgcaccaatcatcaagccagcatcagtagcgtgggggattaccccttgcctttcacgctgccaataaacgtttcacgagcggtggtggaacccagtttttcggcctcattcatcagtttcagcgctttatcgatatcccccgccttgaccgcctgtttaatgccgttattgaagtaagcctcggtgtcattgagcatcggctctgccggtgcggtagcaaccggtgctggagccgcaattgccggagcggtggcccccactacgaccggtggcgttgccggagccgattgcagcatgccgatcatgatattgctggcgccttgttctgccgtcaccttcagcttcaacgtgccgctggtgctgtggctggcgatcggatccgggatgtccggtaccgcgttacccaccccttgggcgtaggctttggctgggttggtcagggtggtggttttagccagatcctgctgagtggtgtacaccaacagataaatctgtttttgccccagcgccggagtcagtttcaacgtgccctccagccgatcggcagacatcacgcccggtggctggtaagcgaaatagctgctcggataataggccgccgggcgcatatgttcatccagcaccaatacgcttggggcatagattgagtttttattggccagactgctcagttggatttccagcgatccccgatcggctggcagcgcaaatgcggcaacggcccccaggatctggccctgattgatctgtgggctgacgttattgagttggacatcctggctaaccggcggcaccagcggctgccaaggcaaactttgcagggtggcggcactgatggccggagcgacggaaacattggccggggtatcggcataggtcgccagcgatgcgccgacggtcaacgccagagacaggcagagtgacagtagattttttttcattgttattaccctctcgctttgagcgtgtatcccggcagcgggcaggcaagcgcactactgccggttaaacggtaagagggagggcgtacaggtccccccccgtcaagccagtattaccaccagatttccatctgggcaccgaaggtgacttcgctgtctttaccacggctgaaggtatgcatgctggtatcattataagccgtacctgcgttgtagcccgcaccggaatcgttgtttgcgtagccccacttctcatcccagttggcgtaggtcgcgaagacacggatcgccggacgtgaccagatgctgttacccgcttgccactgttgtgccagggtgactttgtattggccgttacgatcgccagtacgttgagacttcacgttgtcgtagccaacttccatcagggtgctcatgattggcgtccatttgtacattgggcgcacgcccacggtgtaccaggtggtgccgttgtcattatcgcggttaacgtcctgatacatggcaacgtacatcattgcccaatcatcgttgaagtcgatggcaccgtgatccagcacgcggatcatcttgccgttgtcatcaatggaagccccttggctacggccgttgttctgcgcagtcatggaatcggtagcgtactgcaccacaaacttgttgtagccgcccaggatgctctgggtatgctccgcagtaaacatccaaccgtctttgcttgccccgtcggccaggtggtaatggtcttgtgcgtttgcacggccataatccacacccagttccaacgtaccgcccgggttcagctcaaggccagccaaacgcagatcgtaggtatcgttgacggttggacgctcatcacgttcattgtcgatataacctaaggaaccaccagattcggtgttacgagtcacggcagcagacagcttgccgaagcccagatcgatattttccagaccggcaccaggacctgaaatgtcccagtagtagaagtcgatcatatgaacgtcatgacgttgatagaagcgcttaccggcccacatgttggcacctggcaacgcgtcgatcaggtttttaccctgcacgttaacttcacggaaggccgggctggtagattcccagtcagactgttgcgacacggaataggccacgttagtgtcgaagtagaagctcttgtcgccctctttccacacttcctggcccagtttcagttccgcataggtttcacattcgttacccagacggtacttgctactggctccggttgcctggaaacactgttgttcaccaccgctgccggtccaaccgataccggaacgtgcgtagccgtggaaatccaccgccatcgctgatgaggataagacaccggcggcgacagccagagtcagaggaagtttgcgcagagtagtcatcattattctcctgttatacagaccttgatgctttaaacacccggttcctgatgcagccgtttacacgccgtcccatcctcacggaacaggtggcagcggtgtggcggcaggccgatggcgaatgttgcaccttcttctaccagcaccacgtcgttctggcggtaaaccaggttttgacgaattgccggaatttggatatggatttgcgtctcgttgccgagctgctccaccacctgtacttcacccatcaatgtcacttcagattcggaactcggtaacagatgttctgggcggatacccaacgacaggttggtccccacctcaatgccctgcccttcaaccggcagccataccaattgacgattaggcatcggcagttcgatctgtacccgcagcgcttccacaccggtcactttcaccggcaggaaattcattttcggcgagccgataaagcccgcgacaaagcggttggccgggtagtgatagagttccagcggcttaccgatctgggccacacgcccggcgtccagcaccacgattttgtcggccagcgtcatcgcttcgacctggtcgtgggtgacgtaaatcatggtgcgctgcagccgcttgtgcagacgtgagatctcaatgcgcatctgcacccgcagtgcggcatccaggttggaaagtggttcgtccagcaggaacacatcgggttcagccaccagcgtacggccaatcgccacacgctgacgctgtccaccggacagggcttttggacgtcggtccagcaaatgcgctaattgcagcacttcggacacctgattaacccgctgattgatttccgcttttttagccccggccagcttcaggccaaatgacatgttgtcggccacggacagatgtgggtacagcgcgtaagactggaacaccatgccgataccgcgctcggaaggcggcacctcattcatccgtttttcgccgatgaacagatcgccagaggtaatatcctccagcccggcgatcatgcgcagcaacgttgatttgccgcagccggatggcccgacaaacaccacaaactcgccgtcatcgatagtcagattgacgtctttggaaatcacgacctcgccgaaggccttataaacgctgcgcagtgtgacgctagccatgcgttactcccctgctttcgcagttaacatttcgtgtgaagatggcggaaccgaagcccgccaagacccattgatgaccctcttgctgcgcaccgtactgccatgccataggcttggtcgcctcagccggtgcggccggctgagtataaggctgtaggttgatcagcgcttcaaggcattgatcctgatgggtaataagtaagcgaataacgccattttcctggctgatctggttcagaacaccacattggatcaccgggtgctgacgcagggccaacagggcctggcagtaacgtaaggttgaatggtggtcgtgttgctggcggctgatggccagcgcacggtgttctatcgccacctgttgataccagtggatctctcctgcggtgacctgctccggcgcttcatgccaaggcatcggggtttgtgccccctgcggctcttgcagctccgccgcgtgtggcaagcccaactcttcgccctgatacaaacagataggagcgggcagcaatgccagcagggtcaggaaagcctgcgcagaacgcagatcgccttgcccccaatggctgaccacccgcggctgatcgatttcgccagtactccagactttttcgcccagttggtgacgatgcgtatgtaatacctccaccagcttttcgcagctgaacggcaccacttccagcgccaacgcgctgcgggcatagtgctgttcgggagcggcactgcggcagatacgctgagtgccttcactgtgccaaagtgccagcccgtgtccggccacttccgctccagcctctggcgataacgccagcggcaataacagcccgtccaccgccagtgctttcagatagggcagcgccgccatcatgccgtgtacgtcgcccacaccatcgccgtttccatcgcggaaactgaccggatggatccggtacaacgtggggtgagtagcggtacgcactggtgacataggtcagggttcctgcagcgttaggcggtaaaaatcaatgttgccaatagtgaggtaatggcaaggaggggtaatcatccgtaacaggatttttcatgggggaggagatgggaggatgagagaacgacgatgcgcggcgaaagttcccggcataaggcaaatctgtgatcttccttgcaaaaatagccctgccttttagtgtccgacaccacagaatagggcggtttgctagctggatcacactactcaggcatggggcgtagacggggggaggatgagaacacagcgggttgtgacccactattagcgcgtaaccgctctccttaccgcagtccccacagaaggattggatttatgaatcgcacaatgacaacaaccgtacgcacgctggcgctttcagcattaacgacgctggtgctctcctcctccgctttcgccaaaatagaagaaggcaaactggttatctggatcaacggcgataaaggctataacggcctggccgaggtaggtaaaaagtttgagaaagacaccggcatcaaagtgaccatcgaacacccggacaaactggaagagaagttcccgcaggttgccgctaccggtgacggcccggatatcatcttctgggctcacgaccgttttgggggctacgcgcaatcgggcctgttagcagaaatccacccttccaaagccttccaggaaaaaatctatccgttcacctgggatgcggtacgctttgacggcaagctgatcggttacccgatcgcggtggaagccctgtcgctgatttataacaaagacctgatcaaagaagcgccaaaaacctgggaagagatcccggcgctggataaagagctgcgcgccaaaggcaaaagcgccatcatgtggaacctgcaagaaccctacttcacctggccagttattgccgccaatggcggttatgccttcaagtttgaagatggcaaatacaacatcaaagacgtgggcgtagccaacgccggttcacaggctggcctgcagttcatcgtcgatctggtgaaaaacaagcacatcaacgccgataccgactactcgattgccgaagccgccttcaacaagggccagacggcgatgaccatcaacgggccttgggcctggaccaacatcgagcaaagcaaaatcaactatggcgtcacgctgctgccaaccttccagggcaaaccgtccaaaccgttcgttggcgtgctgaccgcaggcatcaacgccgccagccctaacaaagaactggcgaccgagttcctggagaactacctgattaccgatcagggcctggctgacgttaacaaagataaaccgttgggtgccgtggcgctgaaatcgttccaggaacagctggcaaaagatccgaagattgccgccaccatgcagaactcgcaaaacggcgaaatcatgccaaacatcccgcagatgagtaccttctggtatgcgatgcgtagcgccgtgatcaacgccatcacaggccgccagacggtgaaagccgcactggaagatgctcatacccgtatcaccaagtaataccctggccattggcgggctgtgatgcccgcctttgccctgctgtgtgagaggccattggcctctcgcggtaacacctgaaaggaaagccctatgcaacttgctcacgccggaacatccgcgcgaaaaaaatcgaagtggtggcagagtgacatactgaaatggctgattgtcggcctgttcagcctggtaacctgctatctgattgtggtgatgtatgcacagggagaatatctgttcgccatcctgacgctggtgttggtcagtgccgggctctacgtgttcgccaaccgccgtgcctatgcctggcgctacgtctatcctggcgtcgccggaatggggctgttcgtcctgttcccgctgatttgcaccatcgccatcgcctttaccaactacagtagcaccaaccagctgaccttcgaacgcgctcagtcggtgctgatgcaacgccaattccagaccggtaaaaccttcacctttggactgtatccggcagaaaaccaacagtggcgtttgcagttaactcatccagatagcggccaactactgatttccgcgccgtttagcctcaacgccagtgagccacaaacgttgaaattggcggttgaaagcgctgaacccgccggtgagcgcgctacgctgcgcgtgatcacccagaatcgccagacgctgagccagattgttgccatcctgccagaaggtggcgagttgcgcatgagctccctgcgccaattctccggcaccagcccgttgtacacgctagccaaagacggcagcacgctgaccgataaccagacccaggtacaatatcgccctaacccggagatcggtttttatcaggccgttaacgccgagggccattgggcgaccgacaccctcagcccgggttataccgtcaccatcggctggaaaaacttcttacgggggctcaacgatgaaggcatccagaagccgtttatctccatctttgtctggaccattattttctcggtgatgaccgtgatcctcaccgtggccgtaggcatggtgctggcctgcgtggtgcagtgggaagcgctgaaaggcaaagcggtgtatcgggtattactgatcctgccctacgcggtgccttcgtttatttccattctgattttcaaagggttatttaaccagagcttcggtgaaatcaacctgatgctcaacgcgctgttcggcattaaaccggcctggttcaccgatccactcaccgccaaaagcatgatcctggtcgtcaatacctggctgggttatccgtacatgatgatcctgtgtatgggcctgctgaaagccattcccgacgatctgtatgaagcctcggcaatggacggcgccagcccgatgcagaatttcttccgtatcaccctgccgctgctgatcaagccgttgacgccgctgatgattgccagctttgccttcaactttaacaacttcgtgctaatccaactgctgacccgcggcggaccagacatgatcggcaccaccacaccggccggctataccgatctgttggtgagctacacctatcgcatcgcgtttgaaggcggtgggggtcaggacttcgggctggcggcggccattgccacgctgattttcctgttggttggcgcactggcgatcctgaacctgaaagccagcaaaatgaactttgactaagggagaacgacaatggccatggtgcaacccaaatcccagcgcgtacgcctgtggatcacccatattctgatgctgagctttattgccctgatcatgttcccgttgctgatggtagtggcgatttcgctacgctccggtaactttgccaccggcagtctgatcccggatcaaatctcttgggatcactggcggctggcgctagggatgagcgttacccaggcggatggcagcgtcactccaccgcctttccctgtactgttatggctgtggaactcgattaaagtcgcggcgatcaccgcagtggggatcgtgacgctctctaccacctgtgcctacgcctttgcccgcatgcgttttcgtggcaaaagcaccctgctgaaaagcatgctgatcttccagatgttcccggcggtgctgtctttggtcgcactgtacgccctgttcgatcgcctgggacagtacattccgtttatcggcctcaatacccacggcggtgtgatattcgcctatatgggcggtattgcgctgcacgtctggaccattaaaggctacttcgaaaccatcgataactcgttggaagaagccgccgcactggacggtgctacaccttggcaagcgttccgtctggtgctactccccctttcagtcccgatcctggcggtggtgtttattctgtcgtttatcgcggcgatcaccgaggtgccagtagcttcactgttgttacgcgacgtaaacagctacacgctggccgtcggcatgcagcaatatctgaatccgcagaactatctatggggtgactttgccgccgcagcggtgttgtccgccattccgatcactgcagtattcctgctggcgcagcgctggttggtcggtggcctgacggcggggggggtgaaaggttaatttatgccactgcaatacgtttgatgtactttgtttctctctatgaactgtgtctttggcggccttcgctgggccgccatttttatggttactcccgcttcagccgatcggtattggccagatacaaggtcaccaccagtaataatatggcgccggaataaaccagcgtgtcgaaagggttctcatgatcaacgatgatcaaacgaataatcgcggtgatgccaatatagataaagtagcgtagcgggaagtgatagcccgactcaaagtatttaacaatcaatgcaataaattcgaagtagaggaaataaatcacgatcccctcaatcagctggtacgaagaagactcctcgttactgacgaataatactttcgccaaatgaaaggtttctttgaccaaaaaaactaccagaatcgccgccaatagcagcaaccccacgtttagtacccgctgtagcccttttgcgatcatcaatgatcgtgatgtttttgccatgacttctcccgtcgttcggccagttataagtgcagaaatgcctaatgggctttttcctaaagttgccctgagggtttatcttcaggcgaacccccctattttcaatcagttgcatgaattgattacgcttgtatatatttgtagcaaattgaaatgtcctctatcatgggcgcagtctcaggcattatgcctctaaattcccgtaatctagaaaggaactttcatgcgagctaaactccacgcactggtcgcggcaggccttttcacctgttcgtttgccagctacgccggcggactggtgactcctgataacgatctgcgcaatgacctcgcctggttatccgatcgcggtgtgattaacgtcagcctgtctacctggccgctaagccaggaagagatcaactcggtgctggcgcaagccaaaccggtgactaacacagaaaaaaccgtcattgaccgcgtacagcgccgggtgggtgacttaaaagccaatattaccgtcaccggttatacctctaccgacaagcctggcacgccgcagggcttcggtcagagtcactatgccgacagcagcctgaccatcggcgctggcgccaacggtgagttctgggacgtgcgtctgcaaggtgccgtggaaggcgatcagcgcgtctccgatggttccaaattcaacctgaacggctcatacggtgccatcaaggtgtggaaccagtggctgtcattcggtgaagtctctcaatggtggggtcctggctatgacggcagcctgatccgttccgacgcggcacgcccggtggctggctttatgctgcaacgtgccgatcaatccccgtttgaaacaccttggctgtcctggattggtcgttggcaatatcagctcaccgcaggtcaactgtcacaatataccgcagtacctaacaccaaactgatcggtggccgtctgaccatgatgccaaccgacttcctggaactgggtgcctcacgcattatgcagtggggtggcgatggtcgtccgcaatccttcagctcattctgggacgcctttgctggccgcgataacgacgactccggccaaggtaacgatccgggcaaccagcttgccggtttcgacttcaagctgaaaatgcagccgttgatcggtatgccggtcagcctgtatggccagttggtgggggaagatgaggccggctacctgccatcacaaaacacctacctgctcggcctggaaggtcacccagagtggggcccaaccgttatcaactggtatatcgaaggggctgatacccgcgcagatatgagccgtaagggttacgtgtataaccactacacctataaagacggttactaccagcagggttacccgctgggtcacgctatgggcggtgacgggcaaatgctgtccggccgtgtcgaactggtgctggacgatggccagcgctggagcactcgcctggtgtatgccaaggtgaacccgctgaaccagagcatcaaccaggcattcccgaaatctgacacgctgaaaggcattcagttgggttggggttataacttcgcttcacaagtgaagtttgataccagcctgtggtacaccgataacaacaacagcaccgccgatgacgtgggtgccggtgtcagcatggcagtaccaatcaatctgtaatccctacagatatcaaaaaacccgccgcggcgggttttttattggcggctatttagagcaacttaacgccaggctttaaagcgattgatcaaaccgttggttgaggtgtcgtggctggtcaccgcttctttacccgccagttccggcagaatacggttagccagctgtttacccagctctacgccccattggtcgaaggtgaagatattgaggatcgcgccctgggtgaagatcttgtgctcatacagggcaatcaggctacccaggctgaacggggtgatctcacgcagcaggatggagttggttgggcggttgccttcaaacactttgaatggggcaacgtgcttgacctcttccggcgttttaccctgtgcggcgaactcttcctcaaccacgtccagagatttaccgaacgccagcgcttccgtctgtgcgaagaagttcgacagcagtttgacgtggtggtcgctcaatggattatggctgatggccggagcgataaagtcgcaaggcaccagcttggtcccctgatggatcagctgatagaacgcatgttggccgttggtgcctggttcaccccagataatcgggccggtctggtaatctaccggattgccgttacggtcaacgtatttgccgttagactccatgttgccctgttggaaataagcggcaaaacggtgcatatactggtcgtacggcaggatcgcttcggtctctgcgccgaagaaattgttgtaccagataccgatcagcgccaacagcaccggcaggttttgctcggcaggcgtctgggcaaagtgcttgtccatctcatgcgcaccgctcagcagctgctcgaagttttcaaagcccaaagacagcgcgatagacaggccgattgccgaccacagagagtaacggccccccacccagtcccagaattcgaacatattgtcggtgtcgataccaaactcggccaccgctttaccgttggtagacagcgcggcgaagtgtttcgcgacgtgctgctgatcgccagcggtgctcaggaaccagtcgcgcgcgctgtgggcgttggtcatggtttcctgagtcgtgaaggttttagacgccaccaggaacagcgtagtcgccggatccaacggttttagcgtttcggcgatatgggtgccgtctacgttggaaacaaagtgcatgttcaggtgatttttataggggcgcagcgcttcggttgccatataagggccgagatctgagccgccgatgccgatgttgaccacgtcggtaatcggtttgccggtgtaacctttccagtcaccaccgatgacacggtcgcagaactgtttcatcttcgccagcaccgcattgacttctggcatcacgtccttgccatcaacaatgattggcgtgttgctgcggttacgcagggcaacatgcagcacggcacgatcttccgtacggttgattttctcaccggagaacatcgatttgatcgcgctttgcaggtcagtttctttcgccagtgcctgcagcttctccagggtttctgcggtgatgcggtttttggagtaatccaccagcatctgatcgttgaaagtggcagagaacttggagaaacgctcactatcctgagcaaacaggtcacggatctggacgtctttgatttgttcgaaatgttgctgcagggcttgccaagcagcggtttgactaggattgatatttttcatagcggcgctcttatgcttgagaatgaatatgaggtgatggaccgattgtagcctgttcgcctgtgattatgatctcttttcttgcgataggcgttaactctcagaccgccgcaccccatttttacctttccacaacaatctgctgatatttcacctaacagcctgttatcacaacgctgaaacgtccctctcaccacgcttttctcttgatgcgcagtccgcaatattcggtcgctctgctccccgctgagcgcagatgaaaatccctcagcgtcttcccgttgacagtagccaataaacccgttattcctaacagcctacttgcacatccactgtgcaagccagaagaggcgcgtcgcccaggtagagtgtcagaggagccattatccgatgacggcactggagggggagcgacgccgaggcgagatgcttacggcaaccatcacgtcggctacaggggctgaatcccctgagttgtcaccatgggctgctctgaatgagcagtcagcaaggtggggcgcttctgggtgtatcgtagcctcaacctctacgcctgctccctgtttaccgctcttcccttgtgccaaggcttatggaaattaaatgccaatttgaatggcgtccctgacacgaggttttacatgactcaagcagcaccccaaaacgcaaccgtagtagccaaattcggcggcaccagcgtggccgatttcgaggcgatgaaccgcagcgccgacgtggttctttccaatcccgatgtccgcttggtagttctgtccgcctctgccggtatcaccaacctgttggtggccctggccgaaggctgcgacaccgacaagcgcaacgaacaactggccgaaatccgccgcattcaatacgccattctcgatcgcctcgataacccgatggtggttcgcgaagaaatcgaccgcatgctggaaaatatcaccacgctgtcggaagccgctgcgctggccacctcagccgcactgaccgatgaactggttagccatggcgagctgatgtctaccctgctgtttgtggaaattctgcgcgatcgtaaggtacaggcagaatggttcgatgtgcgtaaagtgatgcgtaccgacgaccatttcggccgcgccgtaccggacagcgccgcgctgaccgagttggctcaaaccttgttgaagccgcgcctgcaacaggcgttggtgatcacccagggctttatcggttgcgaacccaaaggccgtaccactacgctgggccgtggtggcagtgactttactgcagccctgttgggtgaagcattaaacgtcagccgcgtggatatctggactgatgttccgggtatttataccaccgacccacgcgtggtgcctgccgccaaacgtatcgataaaattgcctttgaagaagcggcggaaatggccaccttcggtgccaaagtgctgcacccggccactctgctacctgccgtgcgcagcaacatcccggtcttcgtcggctcaagcaaagatcctgccgcgggtggcacgctggtgtgcaataccacggaaaacccgccgctattccgcgcgctggccttacgccgcaagcaaaccctgctgacgctgcacagcctgaacatgttgcatgcacgcggcttcctggccgaggtgttcaacattctggcccggcataatatctcggtcgatctgatcactacttctgaagtcagcgtggcattgaccatggataccaccggttccactaccactggcggcagcctgttaaccacctctctgctcaccgaactgtcctcgctgtgtcgggtggaagtggaagaaaatctggccctggtcgccctgatcggcaacaagctgtcacaggcctgcggcgtcggtaaagaggtgttcggcgtgctggatccgttcaatatccgcatgatctgttacggagccagcagctataacctgtgcttcctggtgccgggcgatgatgcggagcgcgtggtacaaacgctgcatcacaatctgtttgagtaagcccctcaccctaaccctctcccacagggagagggcactgaacgtgccacaggttaatatctgcacctacctgtagccccctctccccaccacagtacaacaggcatccctggacgccatatcgggagagggccggggtgaggggagatcgattggcctgaactgaatctacagaggcccagcgcactgggcccaccacaacacacacccgttcaatattggcaaaggataacccctctcatgctggcaaaaatcacacgcttattcccattatgggccgtgctgctgtccattgcggcctactacaccccgtcgacctttaccggtatcagcccttacgtcagtacgctgctgatgctgatcatgtttgccatgggcgtcaccctgcgcctggatgacttcaagcgtgtgctatcgcgccccggcccggtagcggcggggatcttcctgcattacctgattatgccgctggccgcctggctgctggcgatgctgttccgtatgccgccggatctctccgccggtatggtactcgttggcagcgtagccggcggcaccgcctccaacgtgatgatctatctggctaaaggcgatgtggccctgtcagtgaccatttcggccgtttctacgctggttggtgtctttgccaccccactgctgacacgcctgtatgtcgatgcaaaaatcagcgtggatatcatggggatgttattcagcattctgcagatcgtggtgatcccgattgggctgggcctgatcgtccaccacagcttcaccaaaaccgtcaagcgggttgaaccctatctaccagccctgtcgatggtatgtattgtggcgatcatcagtgcggtggtcgcgggtagccagagtcatattgcctcggtaggctttgtggtgattattgcggtgatcctgcataacgggattgggttattgagcggctactggggtgggaaactgtttgggttcgatgagtccacctgccgtacgctggccattgaagtcggtatgcaaaactccggactggcggcaacgctgggcaagatctacttctcaccactggccgcgctgccgggtgcattgttctcggtgtggcacaacctctccggctcactgctggcaggttactggtcaggtcgcccgatcaaaaaacaggattaatagcaaacaggctcacaaggggcgaagcatgcggcgcccctacggtcgactttgtcatcaatctgagggccattaacggcccttcattcactatggcgttctaggactttcctcccagtcacggtcatcgtctttctcatcctgatcaagcgcgttataggccaccgcgcagaacagtgagttaagccgcttcatatcccccaacaacgccagatgcagcgagctggtttcgatactttgcacgttttgctgatgcaggcgatcgacgtgcgcatgggcataacgacgatccagaatgcggaaacggtgcttggagcggcgtaaccgcttggcactggtgatatcaccggagagaaacaccgacaggctaaggcgcagattgtcagtcaacttttcatgcagttggtccagttcggccaggccttcggcggagaacgaactgcgcgcgccatgtgattgatccgccacgtcactagccatacgttcgataatatcgccagcctgctccaggttgagggccatttcgatgatctctgcccaacggcgcgaatccgcctctcccaggtcttccttctggatctgcgccaggtagagtttgatggcggtatacaacacgtgaacgtcatcgtccagacggcgaacttctttggcctggatgcgcttaccatgcaatacctcatggtgcaggatcatcatatgttctattacgtcccccatccgcagggtttcgcgcgccgcattagccagtgccaaacttggcgtatccagggcactgacgtcgaggtggcgtggccgcaaacggggatcttccgtaggagcatcgacgatccacgtttcgcacaggcgcgccatcggccctgacaacggcacctgtagcagacaacgcaccaggttgtagaacatgtggaaatagatcaccaactcttctgcattaccaggcagccgctcaataccgtgcgcaatcagggaaacaaacggcagcaccagcgcactgcccaacagtttgaacaacaggctacccagcgccacgcgacgtcctgcggcattctggccgctggtgttcaacatcaccaacaggccgctgcccaagttggcaccaatcaccaggcacagcgccacctgtagagaaatcacgcccgaggcggtcaacgtcgcggttaacaacacagctgccaggctggaatagctgataatggcaaacagggcaccgatcagcgcgtcaagcatcacatcgccggtcaatgacgagaaaatcactttgacgccatagccctgggtgatcggcgtagcggcggccacaatcagttccagcgccaatacaatcaggccaagaccaatggcgactcggcccatctgacctacgcgggtttgcttgcggctaaggaataaaatcacgccgacaaaaatcagcagcggcgaaagccaggagagattgaacgtcagcacccgcgccatgatcgccgtgccaacatcggcccccagcataatcaccagcgcaggcccaagacccaccagcccttgagccacaaaagaagaaaccagcaacgccgtcgcattactactttgcaccaacgcggttacgccaatacctgccacaaaggccagcggttttttctctatgctgctgctcagaacctggcgcaaattggcaccatagacccgcataatgccggtacgaacgatgtgagttccccataccagcatggcaatggcggaaagcagattaagaagggtcaacacggaaggttcactccattgacgcccggcaggcaccacaggctatcccgcctgccagacgccagttaagcaggacagcggcaaatcgcttattgctatcaagaaggaatatccagagggggagctatcaatcattgcgatagcgaaatgatgcaactacccggaatataacagtttccaattgtagcctaatttggttgccctcgggcgaaaattggccacaaacgcgtaaaaactgtgcaatatcaatgaactctgacagacgagtgttattctaatcgtcacacttcaacccttggtaaacagagctgatggaacaccctggttttgcagccattatcgttggcggcggcgttgcgggctgcactgcagcgctattattggcacgcgcgggcatcagtactttgttactggagcggggtactcaggcgggcagtaaaaacgttagcggtggcaggttatactcccatgtcctggccaatctgctgccgaattttgccgctaccgcccctctggaacgtcatatcacccaagaaagactctcaatggtgagcggcaatagcgcggtgacactcgattatcgccataccttgccctgttcctacagcctgctgcgcgcccgtttcgatccctggctgatggcgcaggcggaggccgccggggcgcaatgcctgaccggaacacaggtcgatgaactgatcgtgcagcaaggccgggtggtcggcgttatgacggcgggggaagcgttatacgccaatacggtgatcctggcagaaggggccaatacgctgcttggcgagcatgcaggattgcagccaaagccaccagcagcaacgatggcgatcggcgtgaaagagctgttggcactgccgcgcgaacggttggaagagcgtttcgcactggagaataaccaaggttgcgcctggctgttcgctggccagcccacgcaagggaaaatcggcgggggtttcctgtataccaaccgcgatagcctgtcgctcggcgtggtgtgcaatctttccagcctcacagaaagtaaaatcgccctgccgcagatgctgcaacagttcaaacagcaccctgccgtgcggccattgctgaaaaataccgagttacgggagtacagcgcccatctgatccccgaagggggagcggaaagcatgccaccgctgtttggccctggctatctgctggtcggcgatgcagcccggttatgtatcaataccgggcataccgtgcgaggtatggatctggcaatgctatcggcacaggcagcagcggaaaccttgatttccgggcaagagttgcagcattatcccctacggttacggcgaagttcgctctgggcgctggtccagcagtatcggcgtctgccggagatgatgttgcaatctccccattggtttagccgttacccgcagttggcagccgacgtgctgcaagagatgtttgaggtcaatggaaatgcccctacgccgttgcgtaagctactatggcgccacgcgcgccgcatcggcctgaagcaattactgaaagataccgtcaatggaatgcgcagcctatgaaccagcccgatctcagccacaaccattatcagggggatcacgccgatccacacatcatcctggccgatgcacaggatcgtacgatgctgatgcgtttggtgatcgcctgccccgccgggctgtaccagttccagccggatggcagcctgcgtttcgacgtacagggttgcctggaatgcggtacctgccgcctgctatgtggggaagaaaccatcacccgttggcgctatccgcaggcgggcaacgggattgagttccgcttcggttaaagggcgttggccagagcctctagcacctcgtgcatatcacccacaattcctacgtcagcctgggcaaaaatggccgcctgtggatcctggttgatcgccacaatcagcttgctatggcgaataccgatggcgaacgccggagcaccagaaaccccagcagcaatgcacacttcgggagcaatgatggcaccggacatgcccagcaagcgatccatctcgcaccaggcgttcatcactaccggcctgctggcggccaactctgcgcccatgttggtcgctaactgctgcatctggacaacctgctggacactgccaaccccttccccgatggccagtacatagcgcgcccggctcagcggtgacgctgcgggttgcggtgaacacgccgaggccagtatccactcggcatcgggtatattggctggctcaaagcgtctggctgccaccgggcctggcactatttcaacgtttaccgcactgcttcgggccacgctcaggcaccaaggttcccgtaccatcgccagttcggcggtgagattgttgccatagacggctttggttacccggcattcactgccgttaatttgcgcctgtccccccgcacaacaggcagaaccgccactccggcaggccagacgcgtggccaactcgccaccttcatcgccagcaaacagcagtaatcgcggtgcgaaagcttgccgcatctgctccaataccgctaatcgcgtctctgccagccggggagcgctaacccaacgtatttgagccacctcgccgtccaggcgtggcagactctgtggcacctcatcgctgaatagccagagctccaggctctctgcagcaagctcgctcagccgcaagaactgattaatctggctggcctgcgttggaaagttgggggcatccgcatccaatatcagtgcaatattcatcatggccaccgttcaccgagataatcctggcacaaccgctgcactttctgctccacgctgtccccctcaatcactaccccggcgcgacgatgctccacatagcttaagccacacaattgcacatcactgacgggttgctccgctattgccaggtcggtgggtgacagacgttggacctgccgtttacccgccgccagcttctgctttaacgtgggaacgcgtaacgcactcgcctgttgcgagttccccaccaccagcactaaaggaggcatcaccgtcatcacctcctgcccgtaatccgtttgccgagtaacccgtaaggccctcacttcttctgccgcagctaattggcaaacgccggtgatacagggccagccgaggcgttctgccaacagcaaaggcgtttggctattttgcccttccaggctttgcgcccccatgacgatcacctgttgggaccccatatgctgctgataagccgcgatcaaggcggcaaccgttgcagggttaaaacgcagatcccactccgcaggaggctcaatgcgtaccgcctgctgatattccagtgccatcagttgtttcagcgccggttcggccatagcatcggccaccgtcaagacgctcaggttaagttccctctcatcacgtagcatcagcaccatttccgccgcgctttcgtcatagccgcttaacagacgccgggcaaatcgggtatcaatctgcaaccgctcatcgggttgccaatcgctttttgccaacatgcccagatccggtgcgaccttaatcgccaacagcaggttcatccgtttctcctatcagtgggcgattaacggctttaccgaggaggcgcccaccagcgtcatatccttggtttccggtgcccacatgattgagaccaccgcccccagtaccaatacgcccgtcaggatcagcatggtgccttgcagccccaacgaaagcatcgacagcggcagcaaagcggtgccgatggccgaaccaaaccggctcattgaagtggcaaaacccacccccagtgaacgaatatcggttgggaaactttctgccgggaacaccccaaccagattactgaccgccgaaatcgtcagcgtaaagatggcaaacagcaacagcatcatcccctgccccggcggcacaaaggccagtgcccccaggctggcagccaggatccagaacgcaccgatcaggaagcgacgacgcggtagccattgggtaaagccaatccccatcaaggcccccaccatcagcaggccattgagcagcaggtcggtagcaaagctttggttctgccccagggaggtaaggatagaaggcaggaaggtatagatagcgaaataagggatcaccagacagacaaaaaacaggctgttgaacgcggtgcgtcgccagtaacgcggcgaaaataaggtgtgtatatgacgtgcggtttcgaccggaatttcgtcattaaggatcacatgtggaccaaagcagcgctgcaccaccagatgagcctcggcgatgcgccctttgcgcatcagccaacgtggcgactctggcgttccaatgcgtaatagcataatcaataacgcaggcaccgcgcttgaggccaacagccagcgccaggactccggccccagatcggcaaggaaatggccagcaaatccggcggcgacgtagcctaacgtccagatcacgctaaaggaacccagcaggatgccacgatgcttacgcggagcaaactcggccagcatggtatggcctacggcgtaatcgccccctagcccgatcccgaccaatacccgtagccagaacagctgttccggcgtagtggcgaaaaattgcatcacggaagccaacgtgatgatgacaaaactgaagctgaaaattttctgacggccaatatggtcggaaacccaacccaataccaggctgccaaggaacaggccaatcagtgccgagctgccgatcattccttcccaaaacggcgtcagccccatctgcggcttgagctgggccaacgcaaagccgatcactcccaatacatagccatcggtgaggtgagcgccaaaggttaaccccgccattttgcagtgaaaagcgttaagcggaatatcatccatgcgcacttgccgaggcagccgtgttgtcatcgttaccccccaatgactgtgcgaaaggcccggcaagccgggccagataggattgttatttttcaatcggataaatggtgccggtgttcatgatgccattcgggtcgtacacctctttcagcgccttgaggatgtagtaggcactgccgtgttcatccttggtccagtgcacgcggtgtttgccgatgccgtggtgatgcaccatcgaaccgccctgcttgatggtctcctccacgatgattttattcagtggattgtgatacttgtcgatctcttcttcaggcttgcagtccaccacgttgtagtcatacacaaagtacatgttggtgccgttgatgtagctgtgtgacgagtggccgcccagcatagtgatatcaccggcatgtgggaactcatcgcggatgcggcggatcacattctcgtaaatcgcattgatacagccccagtcgccggaaacctcggtagtgaagcccatattgttggtcttcatgatctgtacacgttccgccgccactttttccgggccccagttcagattgttgaaccaggcttcaatcagcttgctgtcgacctttttacattccggatagcgtttaacgatctcatcaatccccgcgccggtcgcctgcgcaatccctttggccccttcggccataaagatcagtacgcatttgccttcggcaaagtgggtaaaatgctgggtcccgtcttctgcgtcatacaaacgggcaatggaaggacgatagccttcaaccatcacttcccgcaggatatcgaaaccggttggcatgttatcgaggatgtaaccgtagaacaggttgttttccggcatgtatttgaagattttcactgtcacttcggtgataaagcacaacgccccttcgttaccgataatcacatggcggatatccgggcctgcggcccggcgtggcacgtttttaatccgggtgatgttgccgttcgggaataccgcttccagcccaaccaccatgtcttcgatcgcgccgtacagcgtagagaactggccgatactgcgtgttgccaccaggccgcccatctgggccaacggtttggactgcggagagtggccggtcgtataaccctgggcacgcaattgattttccaacacttccagcggtacgccgcactgtgccgtggcctgcatattgcggatatcaatgttgatgaccttattcattcccgagccatccagcaccacggaattcttcactaccgtttccagcccgccctcggtggccgaagccccggtgcgcggtacgccagtaatgccgtgctgattcataaacgccaacacatcggacacttgctgagtgtcggccaatttaaccacggcggcaggcagtggctgggtaaacacgccatgaatatcagcatattttcggaaacggtctacgctgtttttctgcagcactttttcgtcggtaatcacccgctctgggccaacaagttcttttaactgaacaactatttcttcacgggacagagacataaataacccttcctaaattaagaatagataaaatcggcttaagtaaaattaaaaggaaccacccattaatttagcgaaccaaataaccaccatcgacaaccaataaatggccattaacataatcagaggctcgactggctaaaaacaccatcgcccccattagatcctgcgtttccccccaacgattagccggaatatggtcaagaacacgcttattagtttctgggtttttacgcgtttcgaccgtaatatctgtcgcataatagcccggtgcaatgccattcacctgtatattgtattgccctaattcatcgcaataggccttggtaaaacctgccaacgcatgcttagtggccgaataagccggtgaccattggccgcccagataagagaacagggaacagatattaattattttcccctgctttttcgggatcatgatttttgccgcttcatagctcaattcaaaggcagcggtcaggttgatatcgatcatcggatcccagtctgcgcggccaaaatccagtaccttattcagcttacagataccggcgttgttcaccagaatgtccaccgaaccgaaggtctccagacactgggcaatcactctggcaggcgcgcctttctcagtaatgtccacctgcataaactcaactttcaccccttgctgctcaatcatttcgcgggtttggcccttatccatgataaagcttggaatgaacaggttggcaccggctttggccaacgccatggcaaatgcctgccccagaccgctgttgccaccggtgacgatcgcggttttgccttttagcgagaagaaatctaacgagaactcatttaacgcgtttattgacatgattttgccccttggtctggaaaaaacgcaaaaaaaagagaaaagcaacctccctgcacttggcagagaagttacttttctcttcatctctagtaactggcaaaaaaaataacacatagggtcaaggttattccgtgacacctatcacagtttcattttttaccgggtcgcattgacattaaaatttatttatttcgcagtaactcggtgaattactacgcgatcagatcccacctaatgttccctacttcagttttgtgataactctcacagatgaattataggttgccgtgctatttattatcgcagttactgaaagagacgaagagaaaagtaacttcctgcactgcgggaagcttgcttttctctttttttgtttaacgcgatgtacccaataacggttaaaagacgggaatcacaccaaacattaaccattaatgggtgtatttatgcggaacttcaccatggaaaaaaataattcccaccgttggttaacgctggcaataataagtatcagcggcggagtaagtttcgatctcgcctatctgcgttatatttaccaaatcccaatggccaagtttatggggttctccaataccgagatcggcttgattatgagcaccttcggtatcaccgcaattattctgtatgcccctagtgggatcattgccgataaattctcccatagaaagatgatgaccttcgcgatgatcgccaccggcctgctggggttgctgatggcggtctatccgcccttctgggtgatgatcctgatccaggtcgccttcgcgatcaccaccatcctgctgttgtggtcggtctcgatcaaggcggcctcgctgctcggcaaccatgaagagcagggcaaaatcatgggttggatggaggggctacgcggtgtgggtgtgatggccctggccgtattcaccatgtggattttctcgctgtttgcgccggaaaaccccaacagcctgaaggcagtgatcctgatctacagcggcgtatatatcctgttgggcatgctctgttggttctttgtcacagatggctttgtcaccagtgacgagagcgaaaagccgcataaattcagcctgggggatattctctcggtgctcaaaatcagcaccacctggtattgcagcatgattatctttggcgtctataccatctacgccatcctcagctactccaccaactacctgaccgaaatgtacggtatgaccctggtcgccgccagctatatggggattgtgatcaacaaaatcttccgggccatgtgcgggccactcggtgggatcatcaccacctacacccggctgaaatcgccaacgcgggccattcagttgctggcgttagtcagcttggccaccctggccgtcttgctgatcaccaaccagaacccgacctcggtcgccgtggggattggcctgatcctgttgctggccttcacctgctacgcctcacgcgggctttatttcgcctgtatcggcgaagccagaacgccaaaatacattatgggcaccaccgtggggatctgctcggtgatcggcttcctgcccgacgtgtttgtttacccggttatcggccattggcaggacacgctgcccgccgccgaggcctatcacaatatgtggctgatggggttaggggcaacctgcctggtcgtggtgttcaccttcctgctgtttaacaacatcaagcgcgccggcgccaaaagcacaacaacacagccggccaccgaataattatctcaaggagttgcgacatgaagagcaagtacctgatgggtgtggacgtgggcacccagagcgccaaagtggtgatttttgatctgggcggcaacgcaatttgcgaagggaaacagcagttacgcaagatggatatcccggcccctctgctggcggaacacccagacgacgatctgtgggattcgcttaaggtggctttccgccgcgccatgcagcgttttggcgaacgtggtggcaagccgcaggacattctggcgatgggcatttgcatcgtacgctgctgccgggtgctgttgaaggataacggtgagctggcctatccggtgattaactggatggacaaacgcctgaacaagccttacgaatatatcgatgcctatcagggcgtgcgttatgtaacgacaacttcgggttacatcactcatcgcctgaccggtgagttcaaagacacctgcgccaactacatcggttggtggccgatggacaatgaccgcctcgattggagcaccgatcccgccgcctggcaaagctgcaacctgacgcgcgacatggtgctggacgtggtgaaacccggtgaaatcctcggccacatcactcagcaggtggcgcaacagctcggcatccccgcaggtattccggtggtagctaccgcacatgacaaagcggtggaagcgctgggagccggttcactagatgaaggcgttgcgctgatttccctcggcacctatatcggggccatggtacacggccatgccaacgtgaaggacgcgcaaaacttctggcccttccaggcttctatcccagggcgctacctgtatgagtgcatgggcgtgcgccgtggcatgtggaccatcagttggttccgcgatcagtttggcgcagccgcactgtcggatgcccatgacgccgggaccagcattgaggagttactgaatcaggaagcagagcgcgttcctgcgggttgtgaaggcctgatcaccgtccacgattgggcaccaccgtctgaagcggaattccgtaaaggggccatgattggcttcgatggccgccatacccgtgcccatatgtaccgttcggtgctggagggcattgccttcaccatgaaaaaccatatggacaagatggcgctggagctgcaaaccccgttcaagcacctgattatttccggcggcggggccaacagcgatctgtttatgcagatctttgccgacgtgtttggcatccccaccagccgtaacgtgatgaaaggttcggcagcggtgggctgtgccatcaacgccggaatggcggtgaatgtctttagcgattacgagcaggccgcgcagaagctggtacgaatgggggacagttttgcaccgaatatggctaaccatcagttctacaatcagttgaatcagcaggtatatcaacaggtaaacaaacatctggacccgctgctacaggcactcagtccgttggtcgactaaaaggcaggggtaccggcattcggtgcccttacccttacaatttcaacttccatacgtcgtgattggtggtggcaacggcgatggccccggcattcagcgcggtttgcgcatcatcctcatcacacaccaagccaccggcaatgatcggcaagtcgatcttttctgccacccaaccgagcaccttaggcatgcaacccggcaggatttcgatgcagtcgggcgtcgattgcgccacctgtttgtcgatattgtggaaggaaatcgagtccatgataaacagccggtgaatggtgtagaagccttgctgacgcgctgccttcaccatcgaggctttggtgctgataatgccatctgccgccgtgacgattttcaggaaattaatcacgatctccttgttggagctgccttccagcaaatcaacatgcacaaaagcatatttgcccgcgtccttcacctgctgcacgatgcggccaatattgcagatattgccgtacagtaccgagatgatctggcagtccgatttgaccgcgatctgcaggctttcattatcttttaccgctgcgatcaccggatgcagctttaacagttcttcgatagacacgttgttcccctgtctctttcagcctgctggctgcaaattagtccgcatcgtatcccagattcggggctagccagcgttctacgtcgccgatcttcatccccttacgctgcgcgtaatcttcgacctgatcgcgctggatctgtgccacggcaaagtacttactctgcggatggctgaaataccagccggataccgcggccccaggccacatggcgaaggactcggtcagttccatgccggtatggcggttaacgtccagcaactgccagatctccgctttttcggtatgctctgggcaagcaggatagccgggagccgggcgaataccttgataattctcacggatcagctcttcgttactcagattttcattggcggcaaagccccaatgccgcttacgtacctgctcgtgcagatactcggcaaaggcctctgccaaacgatcggataacgctttgaccatgatcttgttgtagtcgtcatgcttggcatcataggccgccgccaaagcatcttcttccagcccaccggtaaccgcgaatgcgccaaaatagtcggctttgccgctgcttttcggggccacaaaatcggccagacagtagttcgggaaatcggtcttttccgtttgctgacgcaggtggcggctgaccaccagcacctcttcacggctttcatcccggtagacctccacatcatccccaacgcggttggccgggaacagaccgtagacaccacgcgggttgaggctaccgttagcggccaacatatccagcatttcgttggcatcctggaacaggcgcttggcctcttcccctaccacttcatcttccagaatgcgcgggtacttgcccgccagtgaccaggtcataaagaacggcgtccagtcgatatagtggcgtagcgtgttaatgctggcctcaaccgggaacacccccagcttgttcggcaccggtggctggtagttttcccaatccagcaccatggcgttatcccgcgcctgttgcaggctgaccggcggcgtacgcggctttttacgcccatgctggatacgcacggtttcgtactctttgcgggtgcgggcgacaaactcgtcccgctgggtgtctgacagcagcgccgcaaccacgccaacggtacgcgaggcgttctgcacgtaggtagtcgggccgctgtagttctgttcaatcttcactgcggtatgagccttggaggtggtcgccccgccgatcagcaacggcagagtaaagccttggcgttccatctcttttgccacgttcaccatttcgtccagcgacggggtgatcaggccagacaggccgataatatccacgttctgttcgcgggcggttttcaggatcttgtccgttggcaccatcacgcccagatcgataatttcgtagttgttacattgcagcaccacgccgacgatgtttttgccgatgtcgtgcacgtcgcccttcaccgtcgccagcagaattttcccggcggtggtgcctttctgtttgctggcctcgatgtaaggttcgagataggccaccgcctgcttcatcacgcgggccgatttcaccacctgtggcaggaacattttgccctcgccgaacagatcgcccaccacgttcatgccagccatcagcggcccttcgatcacttcgatcgggcgatccgcctgctggcgcgcttcttcggtgtctaactcaataaattcggtaatgcctttgaccagcgaatattccaggcgcttcactaccggccagccacgccattcagcctgctgaaccgccacttcattgtctttgctgccccggtatttctccgccagttccagcagacgctcggtgccgtcctgacggcggttgagcaccacatcctcaacggcttcacgcagttcggtgctgagatcgtcatagatcgccaactgcccggcgttgacgatccccatatccatgccgttgcgaatagcgtgatacaggaacaccgcgtggatcgcctcacgcaccggatcgttgccacggaacgagaaggagacgttggacacgccgccggagatcatcgcgtgcggcaggggggttttgatgtcggcgcaggcttcgataaagtcgacggcatagttgttatgctcttcgataccggtggcgacagcaaaaatgttcgggtcaaagatgatgtcttccggcggaaaacccacacgttcggtcaggatctggtaagcgcggcggcaaatctcaaatttgcgttggcgggtatccgcttggccaacttcatcgaaggccatcaccaccacggcggcaccgtagcggcgcaccagcttggcgtggtggataaaggcttcttcgccctctttcatcgagattgagttgacgatgcctttaccctgaatgcatttcaggcccttttcgatcacgctccatttggaggagtcgatcatgatcgggacacgggctatgtccggctcaccggcgatcaggctgaggaaacgcaccatcgccgcttcggcgtcgagcatcccttcatccatgttgatgtcgatgatttgggcaccgctctccacctgttggcgggccacggccagcgcctcgttatacttttcttctttaatcagccgcttgaaacgggccgagccggtaacgttagtacgctcacccacgttgacgaacagcgatttggcatcaatattcagcggttccaggccggacaagcggcaagccaccggtaactctggcaactgccggggcggtacgccctcgaccgctttagccatcgcggcaatatgcgccggagtggtgccacagcagccaccgataatattgaggaaaccggcgtgcgcccattcgcccacctgtttggccatctcttcggcatcgagatcgtattcaccaaaggcattgggcaaaccggcgttcgggtgggcggtcacatagctttcagagatgcgagacaattccgccacgtattggcgtaactcatccgggccaagcgcacagttcaggccaaaggtcagcggtttaacgtgacgcagcgagttgtagaacgcttccgtcgtctggccggaaagggtgcgaccagaggcgtcggtgatggtgccggaaatcatgatcggtaaggtcacgcccagcgcttcaaattcggtttcgaccgcaaaggccgccgctttggcattcagggtatcgaagatggtttcgatcatgatcagatcggcccccccttccaccagcgcgcgggttgattcgcggtaggcctctaccaactggtcaaaagagacattacggaaggccggatcgttaacgtcaggggagatagaggcggtacggttggttgggcccagtacaccagcgacgtagcgcggtttttccggggtgcgcgccgtccattcatcagcacaagcacgagccagcaaagcggcctggtagttaatttcggcggacagcgactccatatggtagtcggccatcgcgatagtggtcgagttgaaggtattggtttcgaggatgtcggcccccgcctccaggtaaccgttgtggatcgcagtgatcacctccggcttgctcaaaaccagcaggtcgttattgcctttcagatcgctttgccaatcggcaaaacgctcaccgcggtagtctgcctcctccagccgatagctctggatcatggtgcccataccgccgtccaacactaaaatacgctgcgatagctgctgacgcagttgttccactcgatttatcactgtagccccttcacacccgattatccgcccgacgacttattaccccacatcccaatgttgtagcggcgcggcacactgcgcccgtcatgcatcctgcaacttgaaagatggagggtctgacatcctagcacaggttatggcggcaaagttgcgagcgggtattgagagtttttcaggttcgccgagcaacagatccgatgagcggagaagcaacttgcaattcatactcaaaaaacgaaaatgaattccatcatacggaaagcataaggtgaatcatggccactcccgtccccgccaaacgcggtaaaaaaccccgcgccgccgcgcccgccaccagcacggcgaccggccaggtccagtcactgacccgtggtctgaaactattggaatatattgccgaagcgcagggcaacgtagcgctgaccgatctggcccagcaagccgggttgcccaactccaccacccatcgcctgctgacgaccatgcagcagcagggttttgtccgtcaggtaggcgaccttggcctatggaccatgggggcacatgcgtttgtggtgggcagtagcttcctgcaaagccgtaacctgctggcgatggtgcacccaacactgcgccgcctgatggaagagtcgggggaaacggtcaatctggcggtgatggacaaagccgaggatcaggcggtgattatcgatcaggtgcaatgcaccgcgttgatgcgcatgtcggccccgattggcggcaagctgccgatgcatgcttctggtgcgggcaaagcctttctggccagcatgcaggatgacgaagtgactaggctgctgcataaaaaaggcatgcacacctataccccgcatacgctaacgccacataacctgaaagaagggttggcggtgatacgcaaacagggattttcattcgacgatgaagagcatgcccttggcctacgctgcctggccgcctgcatctttgatgagcaccgcgaagcctttgctgccatctccatctccggcccggtatcgcgcattactgacgatcgcgtgacggaactcggtgcgctggtgatccatgcggcaaaagaaatcagcctggagtacggcggcgtacggtgattagacgggcgctgcatttggcgccctaggtcatgagcaaatccccgctgttatttttctgtatcgcgctgtagagactttgtttcgctgccggcgaaaagtatgaattcgatcacaattagcgatcttgccaccgaatgccgattgcaacctttggcgcttcccccgacaatgttaccgataacatgttaccggtaacaatcagccattaaataatatagccgcaacagactatgactcgcaggtgggggaaccaaaccatgaccaataatcagaatcgtgtttacgtcattatgggcgtttccggcagcggcaagtctgccgtcgccaatgctgttgcccaacagctatcagccaacttcctggacggtgattttctccatcctcgctgcaatatccagaaaatggcctcaggcgaaccgctcaatgacgacgatcgcgcaccctggttggccgccctgaacgacgccgctttcgccatgcagcgtaccaatgcggtctcgatcatcgtctgctctgcgctgaaaaaatattatcgcgatcggctgcgtgccggtaacgacaatctgtcattcatctatttgcacggcgacttcccagtgatcgaagctcggctggctgcccgcaaggggcatttcttcaaaccccaaatgctggtcacccagttcgccacgctggagcagccgggcctagatgaagttgacgtccaggccatcgatatcgatcagccgctggatgcggtgattgccgacaccgtgcgacatatccagagctttctgccgcaagaagcctgtgcataacgagatgttctgaacaacataactggccctcgccgcgcgcattagggctgcattgtgaggatggtatgattaacagcaccctggcacgtgtaacacaacgcatcattgaacgttcaaaagagagccgagctgcctatctggcgcgcattaatgaagcccgtacgcagacggtacaccgctcgcagctggcctgtggcaacctggcccacggctttgccgcctgccagcccgacgataaagccgccctgaaaaacatggtgcgcagcgatatcgccatcatcactgcctacaacgatatgctctccgcccaccagccttatgaaagctacccacagcggctgaaacaggcgttgcacagcgttggtgccgttggccaggtcgcaggtggtgtgccagcaatgtgcgatggtgtgacgcagggacaagatggcatggagctgtcgttgatgagccgcgatgtgatagccatgtccgcagctatcggcctttcccataacatgttcgacggcgcattgttcctgggtatctgcgacaagattgtgccagggttggtgatgtctgccctgtccttcggccatttgcctgccgtatttgtgcctgccgggccgatgagcagcggcctgccaaataaagagaaagtacgtgtgcgccagctgtatgccgagggcaaggccgatcgccacgcgctgctggaagccgaagcggcctcttaccacggcgttggcacctgtaccttctacggcacggccaacaccaaccagatggtgatggaggtgatgggcctgcatctgcccggcgcctctttcattcatccagacacgccgctgcgcgatgcgctcaatgatgctgccgctcgccaaatcacccgcctgacagaaaccgccggtaattacctgccgataggccaattggtggatgaaaaagtggtggttaacggcatcgtatcgcttctggccaccgggggatcgaccaacctgacgatgcatatggtggccatggctcgcgcagcaggcatcatcatcaactgggatgatttctctgagctttccgattcggtgccactgctgtgccgcatctaccccaacggcccggcggatatcaatcagttccaggcggcgggcggtgtgcaattggtcgtgcgcgagctgctgaacaacggcctgttgcatcaggatgtgcataccgtcgccggtttcggcctggagcgttacacccaggaaccttggctggacaatggccagttggcctggcgcgacggggcagcaagttcgttggacgctaacgtgattgccagcatagccaaaccgttcgagcaccatggcggtaccaaggtgctggccggtaatctgggccgtgcggtgatgaagacgtcggcggtgcctgccgaaaatcagattatcgaagccccggcgatcgtattcgaaagccagcacgatatcgtccctgccttcgaagcaggcaagctggatcgagactgcgtagtggtcgtgcgtttccaggggccacaggccaatggcatgcctgaactgcataagctgatgccaccgcttggggtattgatggatcgcggcttcaaggtcgcgttggtgaccgatggccgtctgtccggcgcttccggcaaggttccttcggcgatccatgtcaccccggaggcctacactggcggtatgctggccaaagtacaaagcggcgatatgatccgggtgaatggccgcaccggtgagctgcaactgctggtctcggaagaagagctggcccagcgtactccctatcaacccgatctgagcggtgaaagaaacggctgtggccgtgaactgtttggtgcgttacgcagccagctttccggggccgaacagggcgcctgctgtatcacgttttaatcctgacatggcccagcttgctgggcctgctatcagccagcctgcgcgtaccccgaaggtaaccgctggctgaaacgccgctttttacggtaggcaaacacatcctcgacgtgcccttccttgatacgctgctgcaaccctctccagtagtccgcttcaaacagatcgctgtgcatctcctcaaagaccttgcggatgcgccggtcgccacacaggaaatggcggaactcttcggggaaaacgtcgttaggtgaaatgctgtaccagggttcgctggccagttcatcttccgggtagcgcggcggcgggatattacggaagttcacctcggtcatgtagcaaatctcgtcgtagtcgtaaaacaccacgcgcccatggcgtgtcacgccgaagttcttgaacagcatatcgccggggaagatattggccgcagccagctgtttgatcgcattgccatattcttcgatggcgtcatgcatttgccgttcgtctgcctgctcaagatacaggtttaacggcgtcattcgccgctccatatacagatgcttgatgaccacccgatcgccgagatcttccagtttttccggcacttcacgctgcaactccgccaacagttgcgggctgatacgcgccttatccaccacaaaattctcatattcctgggtatcggccatccgcccgacgcgatcgtgctcttttaccagttggtagcaggccatcacctgcgcctgcgtaacctctttctgcggcgcaaattcgtctttgatcactttgaatacccgatcaaaggacggcagcgtaaacaccagcatcaccatgcctttcacgcccggcgcaataataaattgctcctgcgactgcgccataaaattcaggtattcacggtagcattcggttttaccatgcttctggcagccgatcgccatatacagttcggcggtggttttacccggcaggatctcccgcaaccactcaaccatcgccgctggcaacggggcatagaccataaagtaggaacgggcgaagccaaacacgatgctggcttcggccttgctggtcaggcaggtatcaatgaacagcgcgccagactcgctgtggtggatcggcaacaggaacgggtaaaccccgtcggccacccgcagtttaccgaccaaccaggccgccttgttacggtagaacagctcattgccgatttggaacgtcgctcccgctagctgttgagagctgaaggtctgcagtaaggcttgggtgatatagcgaatatcacgtggcaggtcttcccatggcagtcgcaacggcaagtcgatcaacaggctgtgcagcatggcagccaaatcaccattgggagtaaaatcacgagccaacggcctgggaatatcgcgaaagcgccgttcgggctgagagctgaaaacgaacagcttatctggggttaaatcccgatgtttgaatagccgacagtaaaccgagttgaagaagctttcggcaatctcaaaacgcgggtagtcaggcaacagctcggtataaaccgccttcaccctattagggaaatccgcatcgtagtatttctgcccggtgatgcatttcagttgctcgaccaccagaccaacgtggtgatcgtaaagatggatacgtcgtttcatcgcctgttgtacggcgggccagtctgcctgctcaaaacgctgctgcgctccggccgtgacttcaagaaagcggccatattgcgcatcaaagccctgcaggatcgtctgtgcaatcaacagctccagtttttccgccatctttgcctctgccattcaggaatgaaacaagagcctgacaccgcgccaggccccttggggatcagaactgctgttcttcggtggaaccggttagtgccgttaccgaggaagcgcccccctgaataatggtggtgactttatcgaagtagccggtccccacttcctgctgatgcgaagcaaaagtgtaaccacgctcgaccgcggcaaactctggttgctgcactttttcgacatagtgcttcatgccttcaccacgtgcgtaagcgtgtgccagatcgaacatgttgaaccacatgctgtggataccggccagcgtgatgaactggtatttatagcccatggcggacaacgcgtcctggaagcgggcgatagtctgatcgtccaggttctttttccagttgaacgacggtgagcagttataggccaacagtttgcccgggaacttggcatggatcgcatcggcaaagcgttgcgcagcttccaagtccggcgttgaggtttcgcaccacaccaaatcggcataaggcgcataggccagcccacgactgatcgcctgctcaataccggcatgggtacggtagaaaccttcggcggtgcgttcaccagacacgaaggcgctgtcatacggatcgcaatcggaggtcagcaggtctgccgcgtccgcatcggtacgggcaatcagcaaggttgggacaccgagaacgtcagcagccaagcgcgctgcaaccagcttctggatagcttcctgggtcggtaccaagaccttgccgcccatatggccacacttcttcaccgccgccagttgatcttcgaaatgcaccccggcggcaccggcttcgatcatcgccttcatcagttcaaaggcgtttagtacgccgccaaatccggcttcggcatccgccacgatcggcaggaagtaatcggtatagcctttgctgccgggttcaatctggtttgcccactggatctgatccgcccgacggaaagtattgttgatacgctcaaccaccgtcgggacagagtcgaccgggtacagtgattgatcgggatacatggcggcagcggtgttggcatcagccgctacctgccaaccggacaggtagatcgcttcgacgcccgctttcgcctgttgcagcgcctggccaccggtcagcgccccaaggctgttcacgtaccctttgcgggatttgccgtgcagcaactcccagagtttcgccgctccgttttgcgccagtgtgcaaaccggattgaccgagccacgcaggttgatcacgtcttcggcgctgtaagggcgggtgatgccttcccagcgtgctgatttccattcctgttccagctgttggatctgttgggtacgagaggtcgtcatatttttatccttttcaatactgtagggttaaaggtcaggaacggtttcaggccagtaattcgtagccgggtaaggtcaggaaatcgattaattcgtcttgcgtggtaatacgctccatcagctgtgccgcctcttcgaaacggcctgcgtgataacgcgcttcacccagttctttacgtacgacctgcatctcttcctgcagcatctggcggaacagggctttggttacctgttggccattgctgaggcttttctcgtgatggatccactgccagattgaggtacgtgaaatctcggcggtggcggcatcttccatcaggccataaatcggtacgcagccattgccggagatccaggcttcaatgtattgcaccgccacgcggatattggcgcgcatgccggtttcggttcgctcaccgtcacacggctccagcagttgcgccgccgtgataggggcatcattctcacgcagcacgtctagctggttctgccgctcacccaggatgcggttaaacacttccatcaccgtatcggccagacctggatgcgctacccaagtcccgtcatgaccattggtcgcttccagttctttatcagcacgcaccttgcccaacaccactgcgttttgctcggcgtctttactggggataaacgccgccattccccccatcgcaaaagcaccgcggcggtgacaggtcttgatcagcaagcgagaataagcactgaggaaaggctgggtcatagtgactgactgacggtccggcaacactcgatcgccatggttcttcagcgttttgatatagctgaagatgtagtcccaacggccacagttcagcccgacgatatgatcgcgcaggtgatacaggatctcgtccatctggaataccgcaggcagggtttcaatcaacaccgtggccttgatggtgccgcgaggtaacccgaagcgatcctcggtaaagctaaagacttcgctccaccaggcagcctcctgccaggactgggttttcggcaagtagaaatacgggccactgccttttgccagcagttggcgatagttgtggaagaaatagagtgcaaaatcgaacaacccgccagggatcgcttccccctgccactgcacgtgtttttccggcaaatgcaggccacgcacgcgggcaatcaacaccgccgggttgggtttgagctggtaaatcttgccagcttcgttggtgtaagaaatggtgccgttgaccgcatcatgcaggttgatctgcccgtcgataaccttgtcccagctgggtgccagtgagtcttcaaagtcggccataaatactttgacgttggcattgagggcattgatcaccattttgcgttcaaccggaccggtaatctcaacccgacggtcgcgcaagtcagcgggaacgccgcggatctgccagtcaccctgtcgaatggaatccgtttccgaaataaaacctggcagctcgccacgatcgattttctcttgccagctggcgcgtgccgccaacagtttgttgcgttgtggcgtaaatttacccaccagttcagccaggaactcgaccgcgtcatccgtcagtatctgccgctctgctgagccgaaagcctgtgtaaacgctaattctgtgcctaccatctgttgcgtcattgtcttgatcctttccatcattccacgctgccattgcaggccaggcgaagcattgttgtcggaaatcgggtgaaaaaaagaccgccaactggtcagatgtcatcccgcaggatcctagaataaccaacaaaaattaaaaatcaaaaacgatttccatttttttaataaatattttattaaccttttattatcaattgattagattatttatcatttgtggcaaactaggaaaccggttccattacgacaaaggaatgccggtaatacattgtttttaaatgagttatagatgctgaaacgttgcagatttggcggggaaaacggtggggtaaaccagggtggcctcgattcagccacccggtacagagaaaaatgttactcgagggtaggattcatatgacgcagatcgaacggcgtgatctggtaaacgtagtagttcaaccagttggaaaacaacaggtgaccatggcttcgccatgaagctgcgggggtcaattcggggttatcattggggaagtaatttagcggtacgctcgggttgaggcctgcatcgttatcgcgacaatactcgcccgccaacgtcagggtgtcatattccggatgcccggtgacaaaggccatgcgtttatccttggtggcgaacagataggcacctgccagctctgattctgccaggatatccagatcggtgtactgccgcaggatctcggttgggaaatcggcatagcgggagtgaggagccaggaaggtctcatcaaaaccccgcgtcagcaaggcatgttggtgcagcgtacgatgctggtacaccccagagagcttcacctcacgcgtcttctttggaattccatacaggatgtttagcgcggcctgcactgcccaacagacaaacagggttgaagtcacatgatccttggcccactcgatcactcgctcgatctgcggccaataggcaacatcacagaaatccaccaggcctagcggagcgccggtgacgatcagcccgtcaaagttctcattctggatatcgtcaaagttacagtagaaattattcaggtgctctgtaggcgtgttcttcgactcacggctatcgatgcgcagtagctgaatatcgatctgcaatggcgagttggaaagtaaacgcaggaactgattctccgtttcgatctttttcggcatcaggttgagaataagcacctttaacggcctgatttcctgtgtttttgcgcgtgaggatgtcatgacaaacacgttctcattacgcaagaaattgaccgcaggtaactcatcaggaacacgaatcggcattgcttatccctcacacatccgtttatacgtttagacttctagatgcccaaagatagcgcttttttagcgtcatgtcgaggattcaacgggaaggtgaaaatgtttcatcgccaggcagggtgggctgttcgtaaatagtaaagcagggagtcttttgtctgtttagttggcagtggtcccctcaccctcaggagagggaagcgatcgagtccgctgacatccctgcgtaatatcccatctttcttcttactcccagcgtcctgaagtggcacgagctcacccacaacgccgggctgctcacactggtgttcctgatgttctcggttgatactgtgggagaaggttgaggtgaggagtatcttctgtttttgacccatagcaaaaaggccatccttacggatggcctcttggcttaattgatgcttggcagtgtcctactctcgcatgnnnnnnnnnnnnnnnnnnnnnnnnnnnnnnnnnnnnnnnnnnnnnnnnnnnnnnnnnnnnnnnnnnnnnnnnnnttcttttgattcttttctttctgccgaacttctaaaccacttaaataaagtggtgctgatacccagagtcgaactggggacctcacccttaccaagggtgc

SEQ ID NO: 198 - DNA, 102219 bp, unknown
  Altogen  635822 strain
  misc_feature (601)..(731): n is a, c, g, or t
  misc_feature (10884)..(10884): n is a, c, g, or t
  misc_feature (36499)..(36499): n is a, c, g, or t
  misc_feature (57239)..(57243): n is a, c, g, or t
tccatgcggggagataaacccagtattcagagtgtgccgttggcttccccggagtgcgcatttccacaaccggcagtttgttcttatcaatcatgccttttactgcttctggcgttttaccaataagacgggcgaattctttatacggcaatgcatccgaaagacgtaccgcctgtttactcatctgctaatctctccgattgtagtaatcagttgcttatagtggcttacaaccacctacagtgcttttgatactaccaatgacaattaattactacgatttgcaaataatcatgtaaagggagtcttatgtcaatagacatagcagagaagttaaagctgattagagagtcagaaaggttaaataggaaggaattcagtgagttaactggtgttccatatagttcactatccagttatgaaacgaggtctaaagggatgggtttagatgccgcgatgaaaatcctgagtcatccacggttcgaaaaatacacattgtggtttatgagtgatcgaatttctccagaatccggccaaatcgcgccggcactcgcacactttgggcaaggagaaatcgcctcacagcactccgaccaaaagnnnnnnnnnnnnnnnnnnnnnnnnnnnnnnnnnnnnnnnnnnnnnnnnnnnnnnnnnnnnnnnnnnnnnnnnnnnnnnnnnnnnnnnnnnnnnnnnnnnnnnnnnnnnnnnnnnnnnnnnnnnnnnnnnnncatccgtcggaaatttgataggaaacatgaagctcaagcttttgaaaaatacacaaccgtcagttatcacgacaaagaatggctttcccggcctgctgacaaacgtgccctttccgagctgattaagctctggtgggaataccacggcaagcttagagagcacgggcaatcaactctcaaaaagttagaaagggtaatgagtggcatggggaatcctgcaactttccagatagataaggcacgagtcacaatgtaccggtcaaaacgactggccgaaggcatgaaggcagccactgttaaccgcgagatttcgtctgtcggtggtatgtttacagacctgattgactccggcctcttttgcggcgaacaccctatacatggcaccggaaagctaaaagagccagcaacggaaatgacctacctttcagccggagagatcgagctgctgctttccgagctaactggtgataaccgcaaaattgctatcctatgtctgagcactggtgcgcgttggggtgaggctatgcgcttgaagggtgaaaacatcgtccataaaagagtgatgtttgttaggacaaaaacaggtaagccacgcagcgtgcccatttcgcaggaggtcatcgacgcaatacaggccaatcgttccggacttttatttccccaggcctcctatcttgatttcagactggtattgaaagccgtaaagcctaacttgcccagcggacagtcgacgcatgcactaagacatacttttgcgacgcatttcatgatgaatggcggcagcataataacgttgcagcgcattcttgggcatgcacgcatagagcagaccatgagttatgcgcactttgctcccgactttctgcaagatgcgattgcctacaatccattaaaggggaaggcaaacatagagcgtccacatagtgtccacacttgagtcgtttttaagggcttacaggtgcctacagtgtgacttaactctttgtttttgatgatatgccccgtagttcggggcattaaaaaggccaccgaagtggccttttgcaagctttcagacaaattaatcgtaagcattaagcgtgcgttggcacaaggcagagcgcacacagtcctgtttgtcgaaacgaataatgccgaccatctcgtcctcttcgaagcgctccagcgcgtcgctaaggccggatttcacgccgcgtggcaaatcgcactgggtaatatcgccgttcacgatcaccgtgacgttctcacccagacgggtcaaaaacatcttcatctggctggccgtcacgttctgggcctcgtccaagatgactaccgcattttcgaaggtacgcccgcgcatataggcgaaaggcgcgatctctaccttgccaatttccgggcgcaggcagtattgcaagaacgacgatcctaaacggcgtagcagaatgtcatacaccggccggaaataaggggcgaacttctcagaaatatcccccggcaaaaagccgagatcttcatccgcctgcagaaccggacgagtgacgataatccgatccacctctttatgtatcagggcttcagctgccttggctgcactgatgaaggttttaccgcaaccggcctcacccgtagcaaatatcaacagcttgttttctatggctgataagtaatgaccttgagcttcggttctagcctcgatggtagaagtatcccggctgtcacgagccatgccgatagattccacaccacccatttgtaccagcgaggtcacgctttcttcttcacgctggcgatgactacgagcgtcacgacgaatgacgcgtttggcttcacgacgtgctttgatcactgctttctgtcttcccatagtggcaccttacagtttgtttcacctaccgcagggcagcaaacaccgagcgattatgttacacacgtattaggttgtggccccctttaaagccattgaatgacgtgaacacctagccgccaacgggcgcggctctttttcacagaacaacgagattggtacaaaacaggagtgtgtgtcagccggattaatgcgaaaggaaagccaagagtcggtcagaaattgagagtcgtagagagagccctcgttacaacgagaaatcagggaaggtatgttatttgttgtttgtagcccaaccaaggactttaccattagcgatccccgcagtgatatttacagcattgagctgtgcaccgtgtgaaaactaccgccagatgattacagtataatgacattcaaccgcgccgcgttgctaaaatgtaaaaaaatttaatattttttgttttaactcgctgcaataccactatatcaaagcgaaagcgacttggcattaatttattttattgttaaatatcaattaattgatattaatcccggcgaatgacatttaggttgccggattaaaaattgagcacataaaaaagcgcagcctttgcgctgcgcttctctgttttgctgaaaaacttagctgttcaagcctgcagcaagccgctggccaaataatcgccacgggtcttgacgcccggtaacacaaagaaatagccgccaccgataggcttgacgtattcctccagcgcttcaccattcaaacgtttctgcaccgtcaggaagccctgctccaagtcggcctgataacagacaaacagcaggcccatctccagttgccccgaattggaaacgcccagcgaataactgtaaccacggcgcagcatcaggctgctctgggtttgcggtgtgcgcgggttggccagccgaatatgggcatccagggggatctgcttaccttccggatccttggcatagtccggttcgtcatgctcgtgcttcatccccaacggcgcaccgctgtgtttttcacggccaaagatggtttgctgttcctgcaatggcgtacgatcccaaaattcgacgtggaagcgaatgatacgcgcggcctgataactaccgccaacggcccaggcaggttcccccgctttatcaccgacccacactaccttatccattaacggcttatcgctggtttttggattggcggtgccgtctttgaagcccagcaggttaatcggcgtctctttgccccggctgcgggccgagtgtgccgagataaaaccttcccgcttccaacgcacgctgagcaagtctggtgaatgcttgatgatatcgcgcagcgcgtggatcaccgtttcattggtattggcacaaatttgcagcagcaagtcaccatgacacagggcagcatcaagtgaatcgttggggaaacgcgtcatggtttgcaggtgcagcggcttctgcgcctgcaagccaaagcgctcatcaaacagcgaggtgccaacggaaacggtgatggtcaggttatcggggtagatttccggccccatgatacccgaatccattggtggcagtttgggatcgacctccggagccctaccgccgctggtgaggaacgcgatacggctgggcaacagacgaaatagccgttccagatcctgcttattggtcgccagcacgtcgaaagccaccagcatcatggccgcctgttgtggcgtcaagataccggattgatgctgaccgtagaacggttgtttttgccagcgttcgtcctgcgaggtagccagcggctcttctgcagcccgtgccagggatggccccgccaacgccagaacgccccccatcatgcccagaccttgcaacaaccgcctgcgcgatggcgaagcggcctgttcatcctgaggaaacggcccgttatgcgggccggtcttatggttcatcattttcgccttaatccagacccagtacgccacgcaactgtgacaggtcttctgccagcgtagtgatcggccctttcatcgcattacgatccgcggtagtcagtttctcgtaagactcataaccctctgcggtcttatatttagccaaaatggtgtcgacggttttaaagttggcgtcaatcttcgccagcagtggttgattggccttttccaacagcggacgcaacaggttcacaatcttctgggcgccatcaacgttggcctggaaatcccacaggtcggtccggctgtagcgatcttcttcaccactgatcttgctggccgccacttcttcgatcaggccagcagcaccacccaccactttgcttggcgggaaagtcagttcaccgatacgtttctgcaactccagcgtgtctttgtacagaccgtcggcatactcattcatgcccttggtggtgttgtcggcgaacagcgctttctccagacggtggaaaccggtgaattttggatcttcggcttttttctcatagtcgtcttcacgggcatcgatgctgccgtccagatcggagaacagctcggcaatcggttcaatacgctcatagtgctgacgggttggcgcgtaaagcttgcgagcctgggccacatcaccggctttgatcgcatcggtgaacaacttggtctgcttgaccagcccttcaacttccttggtgacatagactttatattcggcaatcggccccaccaggtccatcacattcggtttgccatcagctaccgtacccgcagccgtgacgacaagcttgcctttcgggttgctcaacagcccacaggtcatgtcatattcgcccggctcgaggtttgccgtcattttctgggtgaaacctggcgcgatattttcacgctcttccaccaccatcacgcctttgaggatttcccactccaggtttttttggctggtgttatgcaccacaaactgggttttaccggcgggcagggtcaactgcatcggctcacactgtttgtcgttaacggtcaccaaaacccgagggatatccgccgccagcgcgttgaggctcagcgcgaaagcaggaacggccagtaatgcggcatgcagtgccttgcggcgaaataacggagtagacatacggagttccctattaaattagtgatgtgtcttgctttgcgccgggatcgttgaggattcggaacgctgcggcaggaaaaagaaaatcagagcagggatcagatacaggaaatagaccgccacttcgctgaccgatggcgcctcctgatagccaaacattccctctaacagggtgcccagcagtgaatgcgtggatagctggttgctgaggtcgaacgcgatatcctggaagtggttccataatccagcctcgtggaaggcacggatcgccccggcggccaagcccgcagccacgaacagaataaacaggctggtccatttgaagaacttggccagatgcagtttgataccgccccaatagatcagcatgcccaccacgatggcgcacgccaagccgagcatggcaccgattggtgcggcaatgcccacatcctgctgaaacgctgccaacaggaaaaacaccgactccagcccttcacgggcaacggcaaaaaacaccatcgccaccaatgcccacccttgccttttgctcgagttaagggcgttatcgatcgccccttcaagatgtaccttcaccgagcgggaaaccttgcgcatccaaaacaccatataggtcaggatgcacaccgccaccaccgcaaccagcccttcgaacagctcttgctgtttttgtggaaactcgccggtggtttcattgatgaagatacctaacgccaggcacagagcaacggcgacgatcaccccaatccataccacaccaagccattgaccgcgttgagtccgcttcagatagctggcgatcaaactgacgatcagcgcagcctccagcccctcacggaacatgataaggaaaggaacaaacatagaatattaacccctgaaaaggcacttgtagtcagccgctggcactgggttgaccgagaccgcgactatgtaaagaaaagtaaaccagaacgatagtgattatcattctactgaaaagaaaaacaagaggcggaaatgtgatttttattaatcaaatgtcgctagttgttacagcttgatgagacgagtgatggggaaagcggatctctccccgattgccggggagagattaaggcggatttagaccgttttgaactcggcctctgccagatcaaaacgtttagtgatagttgccgaaggctggcgacccatcaggctaaccaccacgatggcgatacagccaaacacaaagccaggaatgatttcatacaaatccaaccaggcgtaatgcttccagacgatcacggtgatcgcccccaccagcataccggccagcgcgccgttacgggtcatacgcgaccacatcaccgagatcagcaccactgggccaaatgcggcaccaaaaccggcccaggcatagcttaccagacccaacacgcggttctctgggttagccgccagagcaatcgccaccagcgccaccaccagcaccatcgcacgccctacccacaccagctcacgctggctggcccctttgcgcaggaaagctttgtacaggtcttcggtgatcgcactcgaacaaaccaacagctgacagctcagggtactcatcaccgccgccaaaatggccgacagcaagatcccggcaatccatgggttaaacagcaacatggccagttcgataaagacccgctcgccgttttgcgtcacattgcccgcttgatccgggttattggcaaagtaagcgatgccgaagaagccaaccgcaatggtccccgccagacagaggatcatccaggtcatactgatgcggcgagcgctacggatggtgcggtgggagccccccgccataaagcgcgccagaatatgcggctggccaaagtagcccaggccccagcccagcaacgacaggatcgccaccagattcagccctttcatcatatccagattggccgggtttttagccgcgatcaccagcattgaactgtcgatgccacccacggcgaagatgacgatcaccggcgtgaggatcagcgcaaaaatcatcaggctggcctgcacggtatcggtccaactgaccgccaggaacccgccaataaaggtatacaagatggtggcggctgctccggcccacagcgcggtagcgtaggtcataccgaaggtgctttcaaacaggcgcgcaccggccacaatgccggaagcacaatagatggtgaagaacaccaggatcacgatggcggaaatcacccgcagcagtttgctgttatcctcaaaacggctggtgaaataatccggcagcgtcaaggcgttgttgttggcttcggtatggacgcgcaaccgtccagccaccagcttccagttcaagtaggctccgatggtcaacccgatggcgatccagctctccgaaatgccggaaaggaaaatcgcacccggtaaccccatcagcagccagccgctcatatcagatgccccggcggagagcgcggtcaccacactacccaggctgcggccacccagaatgtagtcgtcaaagttattggtcgcccgataggccagcaggcctattaccaccatcccaagaatgtagaccacgaaggtcaccagcataggtgtgttcattatcttaaactctccatttcttattcccttccccctttcaagccgccgcatattagcagcctattgaaagttatcgggtatttttatgtcagtaatttcacccgccaagcgccggaacggggcgcactccgatgaaggcggacgaacagcgtttatacccatcatggtctgaacgctggctatcctagttgaggcagtcaacaaccaacaagacatttaacaaaaaagtcacacgaaactcacgccaggtcacatttattcgccgtcaaggttgcactcgccatagtcgaaatgagttgcacctcttacttaaccctgattaacacagggaaataacctggtctcacttaaaaagcccacttaccaccccgtcatccgtaacgctcaagttgttaaaaaatcgatgggagtcacacttcgccacggagcatatttaacaaggttgcacaaagttgcaacatgcaggatattgtcggcatcagaaacctcattactctacggagcgcctctaatctcgctggttgggaggggttccaaacacaggagctggattggcatgggcactaccacaatgggcgtgaagctcgatgaagcaacccgcgatcgcatcaagagcgcggcacaacggattgaccgcacaccacactggttaatcaagcaggctattttcaattatcttgaacgtctggaaagtggttccgatctgccagaaattccgacgctgaccgcaaccagccaggcagaagcggatgatgtcacgccgcaggtgcccgaagagtcccatcagcctttccttgagtttgccgaacagatcctgccgcagtccgtcactcgtgcggctatcaccgccgcctaccgccgcccggaaactgaagcggtgccaatgctgctcgaacaggctcgtttacctgccgatctggcacaggccacccataaactggcctatggcattgctgagaagctgcgtaaccagaagagtgccaacggccgcgccggtatggtgcaaggattgctgcaggagttctcactctcttctcaggaaggggtggctctgatgtgcctggccgaagcgctgctgcgtattccagacaagccaacgcgcgatgcgttaatccgcgacaaaatcagcaacggtaactggcactcccaccttggccgcagcccttcgctattcgtcaatgccgcgacctggggcctgctgtttaccggcaagctggtgtctacccataatgaagccaatctctccagcgcactgaaccgcatcatcggtaagcgcggcgagccgttgatccgtaaaggagtcgacatggcgatgcgcctgatgggcgaacagtttgtgaccggtgaaaccatcgccgaagcgctggccaacgcgcgtaagttggaagacaaaggcttccgttactcttacgacatgctgggtgaagccgcactgaccgaagccgatgcgcaggcctatctggtttcctatcagcaagcaatccacgctatcggcaaagcctccaatggccgtggcatctatgaaggcccaggcatctcgatcaaactctcggcgctacacccacgatacagccgtgcccagtacgatcgcgtgatggaagagctgtatccacgcttgctgtcgctgacgttacaggcgcgccaatacgatatcggcatcaatatcgacgccgaagaggccgatcgcctggaaatctccctcgatctgctggaaaagctgtgctttgagccgcagttggccggctggaacggcattggctttgttattcaggcttaccagaagcgctgtccgtttgccattgatgcggtgatcgacatggccagccgcagccgtcgtcgcctgatgatccgcctggttaaaggcgcttactgggacagcgaaatcaaacgcgctcagatggatggcctggaaggctacccggtgtatacccgcaaagtgtataccgacgtttcctatctggcctgcgcccgcaaactgctggcggtaccgaacctgatttatccgcagtttgctacccacaacgcccacaccctgagcgccatctatcatctggcaggcaataactactatccgggccagtacgaattccagtgtctgcatggcatgggagaaccgctgtacgaacaggtggtaggcaaagtggccgacggcaagttgaaccgcccttgccgtatttatgcgccagtcggcacacacgaaacgctgctggcctatctggtacgccgtctgttggaaaacggggccaatacctcattcgttaaccgtattgccgatgccaccctgccactcgacgaactggtagccgatccggtcagcgcggtcgaggccatggcggctagcgaaggccgcataggtttaccgcatccgcgcattccgttgccgcgtgagctatatggtgaaaaacgcgttaactccagcggcctggatcttgccaacgaacagcggctggcttcgctgtccagcgccctgctcaccagcgcaagccagcaatggcgtgccgagccgattattgatgctccgttggatcaaggagttgaacaaccggtgatcaaccctgccgaaccgggtgatatcgtcggttatgtacgtgaggccaccgaaggggaggtcagccgggcattagcctccgcagccgcagccgggccgantgaggtcagccgggcattagactccgcagccgcagccgggccgatctggtttgccaccccaccttccgaacgtgctgccatcttggaacgcgcggcagagctgatggaaagccaactgcaaagcctgctggggatcctggtgcgtgaggcgggtaaaaccttcaataacgccatctcagaagtccgtgaagcggttgattttctgcattactacgctggccaagtgcgtgacgacttcgccaacgacagccatcgcccgttaggcccggtagtctgtatcagcccgtggaacttcccgctggccatcttcactggtcaggttgccgccgcccttgccgccggtaacagcgtgctggcaaaaccggcagaacagacgccgttggtcgccgcccaggcggtacgcatcctgctagaggctggtattcctcagggtgttctgcaactgttgcctggccagggtgaaaccgtcggttccctattggtcaatgattcccgtgtacgcggcgtgatgttcaccggctctaccgacgttgcgggcattctgcaacgcaacatcgcaggccgccttgatcctcaaggccgcccgaccccgttgattgccgaaaccggtggattgaatgcgatgatcgtcgactcttccgccctgaccgaacaggtggtgaccgacgtcgtggcctccgccttcgacagtgccggacagcgttgctctgccctgcgcatcctgtgtgtgcaagaagacgtggcagaacacaccctgaaaatgctgcgcggggcgatggccgaatgccggatgggtaatccagaacgtctgtctaccgacattggcccggtgatcgacgccgaagccaaaaccggcattgaacgccatatccaggccatgcgtgccaaaggccgcaaggtgtatcaggcagcaaaaagcctgggagatgatgagaaagagtgggctcgcggcacctttgtgaaaccaacgctgatcgaactggaaagctttgacgagctgcaaaaagagatctttggcccggtgctgcacgtggttcgcttccagcgtgccaatctgggcgcgttggtcgatcagatcaatgcttcaggctatggtctgacgctgggtatccatacgcgtatcgatgaaaccatcgccagagtcaccgatcatgccaaggtcggtaacctgtatgttaaccgcaatatggtgggtgcagtggtaggcgtgcagccgtttggtggcgagggattatctggcaccgggccgaaagccggtgggccactctatctgtaccgcctgctggccagccgtccacaggatgccgtgcagcgtactctgaatcgccaggataatgagcgtcctctggaagccaccgtacgccctacgctgcttgtgccgcatcaggccttggaacaatgggccgtggcggagaaccatcgcgagttggcaatcctggcgcaacaatacgccgaactgggccagggtggcaccgtacgcccgctgccaggcccaaccggggaacgcaacacttacgcgctgttgccacgcgaacgcgtgctgtgcctggcggataacaacgccgatgcgctgaaccagttggcagccgtgttggcggttggcagccaggcgctgtggccggaggcagaattgcagcgtacgctgtatcgcagcttgccagccgccgtacaggcacggatcggtttcaccaaggattgggcgcaggataaagtcgagtttgatgcggccatctatcacggcgacgccgatcaactgcgcaccctgtgtgagcagattgctcaacgtagcggtgctattgtctcagtgcagggcttcgctcgcggtgaaaccaacatcctgttggaacgcctgttgatcgaacgctcactcagcgtcaacaccgctgccgccgggggtaacgccagcctgatgactatcggttaatcgccaaattcgagtgacaccaccaaccccgcagcaatgcggggttttttattgtctgaggtatggcagttcaaaagccgtcaggatgcagatatcgcttgccattgatccataaagatatccaccaaaccagagagctcttctcgggttgctccattgcgggcttgcacagacatgccctggatgacattggcaatgtacttacccaacagagcacagttggtgttttccggcagttctccctggcgaacgcgtagctccaggcactcgacaatttttttctctgcggaatttcttggctggctaagctggttaaataacgcctcatcctcagcagacatcccaaaggtggcaacaaccataaagcagccggcgggagtctctgtgtcggtaaaccaatcaacgcaagtacgcagcaactgctcaattacctgtggtaaagggagatcgtcctgttcaaggatcacatctctggcgtgaccgtaagtggccagatacttatccaccgccgcacaaaataagccttccttgctaccaaactcagcgtatagcgaagaaggtttggttcctgtttcctcaatcagttgagacatcgacgtgggttcatagccaaagcgccagaacaaccccatagccttttccaacacatcgtcgcgatcgagttttttaggcctgccacgtgcaggccgctccggtagatcctttctcatgtatagggctccagggccttggtgacaccatttatgtaacgatcactataaaatattgccccagtttataccatggcgccacttaaaataacgatcactacaaaatatgattgcatcatcaccactctgcgcgtatggtcattaaataacgatcgttacataagctgtaaggatcgtcctacgcaaaactttactaaggaatggaatcatgaaattacagagtttattagctatcgaaacaccggttattcaagcctccatggtgtggctgaactctgccgaactggccgctgcggtctctaacgctggggggctgggagtattaggcccgaatgccggacgccaggttgccaatggcggaatagttgcgaccgtagaggctttccgccaggaaataaggaaaaccagaagcttaacggataaaccctttgccgttaattacctcctgcccatcgaaggagtcgatatcagttttaaatacgccgagccgttgctggaggtcatcctgcaggaaaaaattaacatcgtcataaccagcggtaaggatattaccaaaggtgaaacatacatccgcaggctgaaagaggctggagttatcgttattcaccgcgaaatctcaccgacggttgagaactccatcatggcggaaaatatcggggtggatgcgatcattgtcaccggccatgaggctggaggacacctgagtgaacaccgtatcagcaccctggttttactgccccaggtcaccgatgtggtcaaaatcccggtgattgccgccggaggtatctataacctgaaaaccgcaaaggcggccatggcaatgggagctgccgggatctatgtcggcacacgttttatcaccacgtttgaatcccctgccagcctcaataccaagcaagcgattgtcgacgttcagtctgaggagttggttgaaattaatactccggcgggagatattcgcgtcatcgctaccgagagtatccgcgcgggacgcggcgagagcgaagtgggcatcatcaagacaggtatgttagacggagaccaccaatatggggtgatcacggtatctggcgccgctggcggcattggcaagattagcagcgttaaggaagtggtctgcgaattctcttctgcctttcactaatagattctgttgagtagccagtagcaccacgaacatcccaaaagccctggcagaatgaagatggcagccccaattgcgagcctcttcgcaaaccccgcattgacgcggggttttttattgcctgcacaaaagtcagccgataccgtattcatctccttgccaataaatgtgtatggtgtgtattataaggaatgaacaggtgaaaagttcagaactgattaaacgactcgaaagccatggttgggttttacaacggatcaaaggcagccaccatcaattcaaacaccccaactcaccgttggtgatcaccgtgcctcatcccaataaggatgtgaaattgggaacgctgcggcaaatcatgaaggatgcagggttgcttaattcctagaccatttcgcaatgacgaggtaacactatgttttatcccgcttatatacatgccgagcccgatggcagcgccagcggcttctttcccgatgtgccaggctgctactttgccggagacagtctcgatcaaaccttccaggatgccaaaagcgctctggatgcccactttgaattattgagcgaagagaatcaggccattccacgcccacaaacggtgtccttccatctggctcagggcaacgacgccctcaacggcgggcagtggctgctggtggatatcaatatggacaagttcgatggccgggcagaacgcatcaatatcacgttgccccacaggctgctcaaccgcattgatgcgctggtgcagcagcatccgggctatggcagccgcagcgcatttctcgccgccgcagcgcgtaatgagttgttaaaggcaggataacgaggttaagggggcatcgccccctgacaagatcactgattgagaaacttatccagaaactgcttggtgcgctgatgctgcgggttggcaaacaacgccttcgcgggcccctgttcgacaatgcggccatgatccataaaaatggcgcgatcggccacatcacgggcaaagctcatttcgtgggtgacgatcaccatggtgcgtttctcttctgccaaggcgcgaatggtattgagcacttcaccaaccagttcaggatccaacgcagaggtaggttcatcaaacaaaatgacctcgggctgcatcgctaacgccctggcaatggctacgcgctgctgctggccgccggacaaacgtttagggtaagcctgctctttaccgctcagccccacttttgccaacaggacacgcgccagcttttcagcgctggccttggcctctcctttaacgatcaccggtccttcaatgatgttttccagcaccgaacggtggggaaacagattgaagctctgaaacacaaagcccacctgctggcgcagggcccgtacctgatttttttgtttgctcagcgggcgagcgctgtcgatcaaaatgtcaccgacacggatggtgccagaatccggcacctccagcaggttgatgctgcgtagcaaagtcgtcttaccggaaccactaggcccgataatcgccaccacttcacccgcgttcacctcaagatcgatcccgtgcaatacggtctgccctttgaactttttaaccaactgtctgacttcgatggcgctcatcggctactcctgatcctgacggttaacgtgcgcttccagacggttctgcaacgcggaaagcaaggtggccatcacccagtagatcagcgatgccgccagatacatggcgaacacttccagcgtacgtgaggtgatcagttgcgcctgacggaacagctccggcacctgaatggtcgccgccagcgaggtatccttgaccaaaccgataaagctgttgcccaacggaggcagcgcggtgcgagccgcctgcggtaggatcacccggcgcagggtctgccagggcgtcatgccgatactggccgctgcttcccactgccctttgtcgatcgaggaaatcgccgcacgcagcgtttccgatgtataggcggcggtgtttaacgaaaggccgattaatgccgccgggaacggatccagctcaatgccaaactgcggtaagccgtaatagatcataaacagctgggcgatcagcggcgtaccgcgaaacagggaaacgtagatgcgtgacagccaggagatcggccataacggcgaaaggcgcatcagcgccagcaaaaaaccgaggatcaaaccgagcgccataccacccagactgagctggagggtcaacagcgcaccccgtaataaaaatggcgctgaatccagcgccagttgaatactctcttgcattatttagttacgtccgcgccaaaccatttttcagagatcttcgccaacgtcccgtctttctgcatttcggcaatcgcctgattgatagcggccagcagttccggattgtttttacgtaccgctacgccagcttcctggcgagagaatgccgggccagcgacggccagcgtatcaccggttttcttcaccagatccaacgccgccagacggtcgaccaaaatggcatcaatgcggcctacgcgcagatcctgatatttggttgggtcatcgtcgtaggtacgcacatcaacaccctgtacgttgtcacgcagccactgttcgtagttggtgcccaggcccacgccgacctttttacccttcaggtcatcggccttggtaataatgccttcattgcctttcttcaccagcgcctggataccggaaacggtgtatggggtagagaaatcgtactttttcttacgctcatcggagatggtaacctgattgatcaccacgtcgatacgcttggactccaacgaggctaacatgccatcccatttggttggattgagcttggccttcacccccagatgttccgccagtgcattagcgaaatccacctcgaagccggtcagtttgccgtcctcgccctggaagctgaacggcggataggtgccttccagcccaacgatcagcgtgccgcgctgcttgacctgatcgagcaggttatcggccgcgtaggttttcacgttcaagccggtggtcagcgccacggccatcacccccagcagcagttgacgacgaaattttgaaaagaccatagacaccccatctgttgtttatctttttgatttcatgactttaacagtcataagcacttcataaaggaatataacctaataactatagttctaaatggaataacaactgtgctcggcatcagacctgcgggtgataggcgaacagcgcaggagctccaccagtgtgcacaaacaggatcggaccttcatcgcgaaaacgtttctggctgataccatcaatcaaccccgccatcgccttaccagtatagaccgggtccagcagcacaccttcctgctgcgccagcagcttcaccgccgccataccttcgtcattcggcataccgtactgcggggcaaaatagtcatcccacagggtaatgggggccaactcgtcaatatccagcgaacaggcgaccgccttttgcaactgttcaaccttcggtaactgatcgatcaccttgcgggaaacggtcacgccaatcagttcgctctccggcagcagttgctgtagccccaccgccagaccggcgtgcgtcccggcactgccggatgccaccacgatcgaactgaaggtaacgccatggctttgcgcggcaatttccagcgcacactgcacatagcccaatgagccgagcgcgttggaaccacctacggggatgacataaggacggaaaccttgggcttccaaacgtgtggccagatcggcaagttgcatctgcggatcgtgcaaggcatcgcacatcaccacttcaacattgaacagatcgagcagcaggcgattaccgttactgaggtagttttccgctttggtatcgatagggttttccaacagcgcaacgcattgcaggccgagcttggccgccacggcggcggtctggcgaacgtggttggattgaatggcaccggcggtaaccagggtgtcggccccttggcgtaccgcgtcggcggctaaaaactcgagctttctcagcttgttgccacccattgccatcggcgtgacatcgtcacgtttgatgtaaatgtcgcggccaaggtagtctgaaaggcgggataacttttcgagcggcgtggcagagccaaccaaatccaggcgcgggaattgcgccagttgctgttgcagatccacaacttcccccagggaataaaataacggtgtttgagtgatagatttatcagatgtgctctgaataatcactctttattcgtgggggtgggtgcaaggtaacccggccaaccgaccgggtcagatcactcagtagcttttttgccaggccaggtactggtcgtatttacgcagcgcaatgcggtagttatcgctcaccgccggtggcaaatcgtcaataatacgctgatggttgaacgcactggcaaactgatcggcaggatagttgtgtgccaccagcatttcatccaggcgccgcaggcgcacgacatattcacggatggtgctgtggttcatctcggtttgttcaaacagatactgtttaaacgccatgatgtcgaagtagctggggtgactattacaggagatttcactacaaaaacggcatagcgcggtcaactcgctttgcacgttttgccagaccagatcgtcaatcggctgatccatccgggcgatggcttccttattgatgatcttgccacggaacaccagcgccatgcggtcaagcaccttctcgcactgggagcaatgggtttggctgtgtttataatctttcaggtagcggctgagtggccgtttcttcaactgttttcctggcatcatttgcagtccatttattgcggcagtaatcaggttggttagggaggcaggctttggggttcaggagtcctgggccagacgtgcccgcaggcgtttaatcgcctggctgtgcaactggctgactcgcgactcacccacatcaagcactgcgccaatttccttcagattcaactcctcctggtaatacaacgtcagtaccagtttttcgcgttccggcagcgcctcgatggcgtcgatcacccgctggcgcagattgccttccaacagttgatgcagcggattggcagcttcatgaccttccagcaccggttcggcactgtcgccatgctcttcctgccattcgtcgtaggaaaatagctgactattattggtgtccagcaggatctgacgatactcgtccagcgagacatccagcccctgtgccacctccacttcgctggccgggcggccaagccgctgttccaactgctgcatcatgcgcgccacttcccgagcattgcggcgtacgctgcgcggcacccagtcgcggctacgcaactcgtcgagcattgcaccgcgaatacgctgcacggcataggtcgtgaaggccgttccttgtagggcatcgtaacgctcaacggcgttcaacagccctattccccctgcttgcagcagatcgtccagttccacgctggcgggcagccgaacctgcaggcgtaacgcctcgtggcgcactagcggaacgtagcgcagccagagagaatttttgtccatgacgccttcggcggtatacagatcgctcactatgtctaacctgcggataacggagtcatgactattatccgtagcaggcgcaataccaatcgtctgaacagccgtacaaaacgggctttatttgtgccatgtaaaaaccgagacggcagcagaagacaaaaaaccctgccgaagcagggtttggatgacaaggctaatcggagagagtcgattaacgcagcagggtcagtacgttctgggtagactggttagcctgggccagaacagaggtgccagcctgttgcaggatgttggcacggctcatgttggacacttcggtcgcgtagtcagcatcctgaatacgagactgagaagcagacaggttgttaacggtgctgttcaggttgttgattacagaatcgaaacggttctgtaccgcacccagagaagaacgcaggccgtcaacttgtgacagagctttgtccagagttgccagtgggtcgacagtttttggatcggtagactgttgcgcgcctttggttactttgccagatgcatctacagtagctgcatagtaagcgtcgttaccgttgtcatccttacctttgatcatataacccgctttaccagccggatcggtataggaatgcagttcatcgctgccagttaaaccactaacggtggtggtaccaactttaacttgagcctgttccttgatcccagcggtagacttagctgtcgcagtggtagaatcccaggtcactttaccgtcagcggcaacagcggcatcgtaaatagagccatcggtagcttttacaaagaaatcggtgccattcgtagtgtaaagcttgctatcgctggtttttggcgtgccattcgcatcagcctgaatagccggtggccccattttatcaacagcagtcaatgctgttccgcccactttggcagtatcgattgggtttgctacgctgaatttatccaagcccagagttttagcattgatatctttcagatcgatatcgatggtttcaccatcgttggcaccaacctgaatggtcagtttctgatcgctgctcaacactttcacgccgttgaagtcggtttgctctgaaatacggttgatttcgttcagacgctgagagatttcatcctggattgactgcaggtcgctggatgagttagaaccgttctgagactgcacggtcagacgacggatgttctgcaggttgtcgttgacttcgttcagtgcgccttcagtggtctgcgccagagagataccgtcgttagcgttacgggaagcctgagtcaggcctttgatgttagcggtgaaacggttagagatcgcctgacccgcagcatcatccttcgcgctgttgatacgcagaccggaagacagacgctcgatagcggtccccagagaagactgagatttgttcaggttgttctgcgccatcaacgacaggctgttggtattaattacttgtgccataatttgctttccttacgaatcagttgcgacgttcgcattcacaattaaagggttcggaccttgttggtccacggcgtcaaccaccgtctcctcaggtatcggcgctccccccacaacctttagattttttttgcgtttttttcacttttcgccaatggcgcgaataacgctgtttttccctcttctactgcgccatcgttttttctatttatccgtaaactttttgaatactgagccgataacgcatagagcgtaaaagtcattgaccataggagaatcacgaatggcatcgattagttcattaggcatcggctcagggctggacctcaacggcttgctggacaagctgaccaaggcggaacaacaacgtctgacaccttatactactcagcaaaccagctataacgccaagctgaccgcctacggcacgctgaaaagctcactggaaaaattcgataacctgagcaaggatttggccaagccagaattctttaacaatactaccgccaccactcacgatcagtttaacgtgactaccaccgccaaatcggtcccgggtaactatagcgtcgaggtgctgcacctggcacagccgcaaaccttgacgacaaaggccgatattaaagatcaagcggaaaagctgggcactagcggcgccagcgatcgttcgatttcgatcaccgccggcaacccgcccaaagaggtcaaaatcccgctaggtgacgatcaaacctcactgctggaaatgcgtgatgcgattaacggcgccaaagccggggtgaacgccaccatcatgcgcgtgggtgacaacgactatcagttggccatcagctcctccaccaccggcgaaaaaaatacggtcaaggtgcaggttaataatgacgataaactgggggcgatcttaaattatgatcctaccagcaccagcaacgcgatgaaggaaacggtcaaaggccaagatgccgagttgaccattaacggcaccaccatcaagcgcagcaccaattcggtcgccgacgccctgcaaggggtgacgctggatctgaaaaccaccaccaaaccgggcgaaccgcagaacctggtggtcaccggtgataaaagcggcacctcggacaaggtcaaggcttgggttgatagctataactcgctattggataccttcaattccctgaccaaatacaccccggtgaaaagtggcgaagagcagagcgccaaaaacggagcattgctgggcgacaacacgctgcgcggcatccaatcctccattaagagcgcgctgagcgccgcacaggacaacccggagctgaaaggcttgggtaacctgggtattaccaccaataccaaaaccggcaagctggaattggacagcgaaaagttgaaaaaagcgatcgatgaaaaacccgatcaggtagccaatttcttcgcgggtgatggcaaggagagcggtatggcgacggaaatccacaatgagatccaaaactatatcaaggccggtggcgtgattgagaactcgaccaagagtatcaataccaacctcgaccgtttgaatactcaaatcacccgcgtgaccgaaagcattcaaagctccatcgatcgttacaaacagcaatttgttcagttggataccatgatgtcgaaactgaatggtaccagtaattatttaacccaacagttcacgtctaaataggcgcgttaaccaggtaaaatagcatgtacaaccgcagcggaacccaggcttacgcccaggttagtgtagaaagtggcgtgatgggtgccagcccgcaccagctcatcgtgatgctattcgacggggcgcttagcgccctgcttcgtgcacgcatcctgatgaatcaggggaatatcgccggcaaggggctggcgatctcaaaagcgattaatatcattgataacgggctaaaaaatggcctcaaccatgaacagggaggggagatcgccgataatctcgcagccttatatgattatatgaaacgccgtctgatgcaggccaacctgcacaacgatgtcgcggcccttgacgaagtcagcgggctgctggagaacattgccgacgcctggcgccaaattggccccaattatcaacccgttcaggacggcgtataatggaacaccaccaacaactgctatcggcctatcaacagatccataccctgagcgagcagatgatcaccctggcgcaggctggccagtgggatgcgctgattgaaatggagatcgtctatgtacaggcggtagaaaaaaccgcccaactggcgggtatccctgagccatcttcgagcttgcaggatattttacgcggtaaattgcagcaaatcctcaacaacgaaaccgaactgaagcgactgatgcagctacgcatggacgaattaacggtgttgatcgggcagtctacccgccagagcgtggtcaacagcacctacggtcaattccatgaccgcgctttgctgcttggtgagccgcaaccaagataaatcttatgttttaccgtctatcctaagtaattaataggataaaacactattattatcccgttgcaccataatataaacgcatgagatttgaataattcgtatggcaggtaatgcatgaaaatgcaaaccgctggcactattgccgatttaatggataacacttatcccgacacggacgttttctgttcaacaggaaactgattcttgacaagtaaattaccgagttgtgatcggcaacaggcgaaaaaatgttgctccatcccccagcaaagcgtaaagatattcgtagataataacgatgaaatgaatattgatggaacgcttaattaatttttgtcctgggatcggtgcctcagcacacatcattcagcatactgaactgcgacttccgtcgctctattttgagcagacgcatctgtttttgatccaacaagggcaaacacgtatacggtggcagcagcgggaggtggtagctcgcgctggggagctgttgatcgtagaaggtgggctaaccgccgatgtgattaatagcctttcagacagtggaatattcagttgccaactgctgatttgcgatcccttgctgtttgatacgctagccaatgcgcctatcgcgccgccgcctatccctttcaccggcgtcactacgctgacgaagctgccctgcccgtttttgcacagttttgaaaccgctgcactggcactgacgctgcacgatcgttttccccagatgattatccaccataaaatgtgcgaaatactactgtggctggcacacctggggattcgctttattcaccaggaagccaataatctgacccagcaggtgcgccgcttgctggcaagcgatccgcaacggatttggaccgccgccgaagtggctgaaaatctgatgatgagcgaggtggtgctgcggcgtaaactgtcggcggagaatagcgccttgcgcagcctgatgatcgacgtacgtatgagccgcgcgctgctcttattgcaggccacagactggccgatttccgccattgcacaatatgtgagctacgagagttcttcccggtttgccgaacgctttcgtaaacgattcggcttcgcgcctaccgccatccgtgggcaccagcgaattatgcagcccaccgccgtgcagcccccggcatatccatggctaaatacggtagaggaataagtgctgattttaacaacggcaggctgaggatgtgactaaggccaccctgagtggcccgtacatcagttgagtttaactaacgcataggtcaatacggccaacacaattaacatgacaatactgaaaaaacgccatcttacttcacttttagtgctcatcacctttcccgaataaatactattagcgcgattatttccatagagaaaataacatccttgccaaagccgtgtatcgttcgtcttatccacaacggcatcagcctactccaaagcacgatcgaaaaaataacaactaccgcacaataggaattaggtctttcaataaaacagaggtatttctttaagttacacagttcgcggttctgtgccagtgcttgaatgagactcaatcgcctcaccgtcagccaatactttttacgtgggctacgagtgacagagaacgactccgcttaaaaatataagatagctcctgggggccataaggatatatctaatttgcacaccggttaattgacattcaggacaataactacaaatattagcttaattaaccaattcaaggaggataagataatggagtatttggtagcatcgctgactgttttatgccttttttcctttaagaaacacgccaaagttattgatagtaaaaagattggcgtcgcccataaaaaacaccgccgacgctcaagacaccggctcgccatgatttattgattgggcaaacgggccgaaaatcagagaaaatcacattagggaggcttacgccaatacagaacagattatctgttgtgtgctatagccaccctttatttccccctacaccgccatattcatgacgtcttgataagccgcaaccagtttattacgcacctgcactcccagttgcaaagaaaccgaagatttttgcagatcgaccatcacgtcgttcaaactgatccccggcacacccaattcaaaatcctgtgcttgctggcgtgcagtttgttgagtctcgctgatcttaccgagagccgcctttaactcattggcaaagcttgctccctgcaccggatcgttttgtcgcagcgctccggcctgaactgccgtggcttgcaactgctgcaccactccttcaataccctgaattgccatcatgacctcgtcacttcattcatagcctatggatttcatgcggtggtctgaaagacgacgggaaaaccgcgccttcattcacctgcatgatcccgatgctgcacaccctaccacagtgttttccggctaaagcggctaattaactgcaaaaacaccggtttatcgggccatcgaaattggctccaagagcaaataatggcatgcccaaaaatgggggcgcttttgttaggccgtaaagaactgtgtattcagggagtctgttttgtcatcactcaacaacgctagccatacctcgaacccaccagagtgggtaccagcatgaatggtgaaagccgtgataacggcctgctggccctatggaatcgcctgcgtgccaaccctaaaattccactgctgatcgcagcctcggcggcgatcgccatcgtggttgcgctgacgctatgggccaaaagcccggattaccgcgtgctgtacagcaatctcaacgatcgcgacggcggcgccatcgtcacgcaactcacgcagatgaacatcccctatcgctttaccgagaacggctcggcgttgatgatcccggcggaaaaggtgcatgaaacccgcctgcgtctggcgcaacaggggctgcctaagggtggggccgtcggctttgagctgctggatcaggaaaaatttggcatcagccagttcagcgaacagatcaactaccagcgcgcgctggaaggcgaactgtcacgcactatcgaatccctggggccggtacagaatgcccgtgtgcatctggcactgcctaagccttcgctgtttgtacgcgaacaaaagaacccttcagcttccgtgacgctaacgctgcaaccaggccgcaccctggacgacggccagatcaatgccgtggtgtatatggtgtccagcagcgtggccggtttaccgccgggcaacgtcacggtggtcgatcaggctggccgcttactgacccaatccgacggcaccggacgcgatctcaatgccgcacagctgaagtacgccaatgaggttgagagccgctatcagcgtcgtattgaagccattctggcaccgatcgtcggcagcgcgaacgtgcgtgcacaagtaacggcacaaatcgatttctccacccgtgagcaaaccgacgaacagtaccagcccaaccagcagccggataaatccgcgatacgctccagacagctcagccagagtgaacagaacggcgggcaacagattggcggcgtaccgggtgccctttccaaccagccgagtgcagcaccgactgcaccgatagaaacaccaaaaactacggctgcgggtaatactaatactcccgccacggcaaacaatgccaataacagcacgcgaaccggggctagcggtaacgtagcgcaaaacagtcgccgtgatgaaaccaccaactacgaggtggatcgcaccattcgtcatacccagcacaaggctggagcggtggaacgcctgtcggtcgccgtggtgctcaacaccctgggtaccgataaagacggcaaaccgcagccgatgagcaaagagcagttggcccaggtggagtcactggtccgtgaagcgatgggttactccagcagccgtggcgatacgcttaacgtggtcaacaccccgttcaacgatgtagagcagaccggcggcgagttgcctttctggcagtcacagtcgtttatcgatcagttgttcaacgcaggccgttatttgctggtgctgctggtagcctggattttgtggcgcaagctggttcgtccgcagctgcaaagccgtcagatcgcacaacaggccgcggttactgctgccaaggcaccagctagccgcccggctgaggtcaataagccaagtcatgaagagcaggcgctgcataagaaatcacagcagcgcgtcaatgctgaagtccagggccagcggatccgcgaactggcagataaagatccacgcgtggtcgccctggtgatccgtcaatggatgagtaacgaattatgagcctgacaggtaccgaaaagagcgccatcctgctgatgacgctgggtgaagatcgcgccgccgaagtcttcaagcacctctcgtcacgggaagtgcagcagttgagtggtaccatggccagcatgcgtcaggtgtctcacaaacagctgggggaagtcctcagcgagtttgaagacgatgccgaacagtatgccgcgctgagtgtcaatgccagcgactacctgcgctcggtgctggttaaagccttgggtgaagaacgtgccagcagtctgttggaggatattctcgaatcacgcgaagacacctccggcatggaaacgctcaactttatggaaccgcagagcgcggccgatctgatccgcgacgaacacccgcagatcattgccaccattctggttcacctcaagcgcggccaggcggcggatatcctggcacagttcgaggagcgcctgcgcaacgacgtgatgctgcgtatcgccaccttcggcggtgtacagccggacgccttggcagagctgaccgaagtgctgaacaatctgctggacggccagaacctcaagcgcagcaaaatggggggcgtccgtaccgccgccgagattatcaacctgatgaaaacccagcaggaagaggcggttatcggtgccatgcgcgactacgacggcgagctggcgcagaagatcatcgacgaaatgttcctgttcgaaaacctggtcgaagtggacgaccgcagcatccagcgcctgttgcaggacgtggaaagcgaatccctgttgatcgccttgaaaggggcagaacaaccgctgcgcgagaagttcctcaagaacatgtcacaacgtgccgccgatatcctgcgcgacgatctggccaaccgtggcccggtgcgcatgtcgcaggtggagaacgaacagaaggctatcctgttggtggtacgccgcctggcagaaaccggcgaaatgatcatcggcggtggcgaggacacctatgtctgatcgcctcaataccctgccctggcagccctggtcgcttaacgacctggcggatcccaaaccggtgctggaaccggaaagcccgcctgaggtgatcatcatcccgcaggatgacagcatcaacgaacagcagcggctggagatgctgcgtttgcaggcccaacagcaaggtcagcaacaaggctttgccgagggccagcagaaaggctatgacgccggtttccaggccgggctggaggaaggccgtcagcaaggcattctggcgggccaacagcagcagcaaccgatcacggaacattggcaacggttggtcaccgagttccagcacacgctggacgcgctcgacagcgtgattgcctcacgcctgatgcaactggccctgacggcggccaaacaggtcatcgggcaagcaccagtgtgcgacggtactgccctgctcggccagatccaacagctgatccagcaagaaccgatgttcagcggtaaacctcagctgcgcgtacacccggatgattacgaacgggtagagcagcagcttggcatgaccctcagcctgcacggctggcggctgctggccgacggacagttacatccaggcggctgcaaggtcagcgcagaagaaggcgatctggatgccagcctggccacccgctggcatgagctgtgccgtctggccgcaccgggagagctgtgatgaccgttcgtctcggccgctggctgaactcgctggacagtctggaaaaacgcattgcccgtgcgccagcggtgcgccgctatggccgcctgacccgagctaccgggctggtactggaagccaccggtttgcagttaccgctgggggccacctgcctgatcgaacgccatgacagcggtgtggtgcaggaggtagaaagcgaggtggtcggttttaacggccagcgactgttcctgatgccgctggaagaagtcgacggtatcgtgcccggcgctcgggtctatgctcgcgtctcccccgaagggcaaagcgccagcaaacagttacccctcggcccggcattgcttggccgggtgctcgacggcggagccaaaccgctcgatggtctgccagcacccgataccggctaccgtgcgccgctgatcaccgccccgttcaacccgttgcagcgcaccccgatcgaacaggttctcgacgtgggcgtgcgcaccattaacgggctgctcaccgtgggccgtggccagcgtatgggcctgttcgccggttctggcgtgggtaaaagcgtactgctcggcatgatggcgcgttacacccaggccgacgtgatcgtcgtcgggctgatcggtgaacgtggccgcgaagtgaaagactttatcgaaaacatcctcggcaccgagggaagagcccgttcggtggtgatcgctgcaccggcagacgtttccccactgctgcgcatgcagggcgccgcctacgctacccgcatcgccgaagatttccgcgatcgtggccaacacgtgctgctgattatggattccctgacccgctacgccatggcgcaacgtgagatcgccctggcgatcggcgaacccccagcgaccaaaggctatccgccttcggtattcgccaaactgcccgcgctggtggagcgtgccggtaacggcatcagcggcggcggttccattaccgctttttataccgtgttgaccgagggtgatgaccagcaagacccgattgccgattcggcacgcgccattctcgatggccatgtggtgctctcccggcgcttggcagaggcgggccactaccccgccatcgatattgaagcctcgatcagccgagccatgacctcgctgatcgatgaggagcattaccggcgggtacgtaatttcaaacagatgctggccagttaccaacgtaaccgcgatctgatcagtgtaggagcctacgccgcaggcagcgatccgctgctggacaaagccatgacgctatatccgcagatggaagcctacctgcaacagggcatcttcgagcgcagcggctacgacgatgcctgccagcagttacagcaactgattgtttaaccacggagcctgagcaccatgaaaccacagtcaccgctgattatcctgcgcgatctggcgcaggatgccgtagaacaggccgcacagcacctcggtcaggcacgtcaggcgcaacaggcggcggaacaacagcttgccatgctgctcaactaccaggatgagtatcggcaaaagctgaacaacaccctgtctagcggcatgggttccgccagttggcaaaactaccagcagtttatcggcacgctcgagcaggccatcagccaacaccgccagcagttgctgcagtggagcgagaaggtagaacgggcggtcaagcagtggcaggacaaacagcagcggctgaacgcttttgaaacgctcaacacccgtgccctcagcgccgagctggtgctggaaaacaagcgtgaccaaaaactgatggatgagttcgctcaacgcagttcacaaaggaatctaaacccatgaatctcaacgttctctctggcttgccggcggccgctgacggcacggagactggccttaccgcgctgtcgttggatgatgccgggctgtctgccagctttgctcaactgctcggtgaacgcttcgcgcctgaaggtcaactgaaaggcaagccgaacgtggcacagctactggccaaagatccacaactctcaaccctcagccgccagcagcttaaccaactgctgacctcgtttagcgatcgtggccgattgctggctgccccgcaggatctggatacggcagacgataaccaaacccggttaaccaagcgcgatgatgaacagccgttgcaccctgtcgatactttggatgcggccagtttgcaggccctgtttgccatgctgcctgccgccgttgtgcagccgctacagggaaatggggtagcaaccgccgctgagccaagcggggacgaagcaccgctgacgggagctgcatcactgttagccaccatgagcgaaaaacccgcgttatccactgccagcctaccagcgtcaaaatcgcagccgcacgcagacgataaatccgccttggccgccaaaactgacgcagcggcggtactgtcttctcaggccaatgacaatcaggatcgcggcacctccccactgaaattggtggccgaatcggcgcaatcttctgcaacgccacagcacgcagcccctgcaccagtgtccagcccggtgatcgccagccaacctgtcagcgcgacggtaagcgcaccggcaacgccacagttgaacgctcaactcggcagccctgaatggcagcaggcgctgagtcagcaggtgctgatgttccaccgcaacggccaacagagcgccgaattacgcctgcatccgcaggaactgggtgccttgcaaatcacgctgaagctcgacgataaccaggcccagttgcatatcgcctcggcacacggccaggttcgtgcggcggtggaagccgcgctgccccatctacgccatgcgctggcggaaagtggtatcaaccttggccagagcagcgttggcggtgagtcactgccgcagccgcaacagtcacagcagcaagcctctcaccaaggcgggcagccttcttaccgtgaacagcacggcagcgccgaaaccggcgttgaagccctgagcgctccagcagcgctgcaggcaatggctcgttcggtcgacggcgttgatattttcgcctgacggcgtgcaaacgcccaagctggcacgcttttccccgcctattctggctattgcagcctggaataagcgggataatagctttacatgtattgcgtgctgcctatctgcacgcagagaacaggatttgacttggtaatgtctcagaactcccttccaacagcagcaacaaagaaacgtccaatactggtgatcctgctggtactgatcgccttgggcgcatgtggtgccgcaggctatagctggtggttgatgcagcagcataagaacggtcaacccgccgccgaggaaaaaaagcagccgcctccggcaccggtgtttatgccgctcgatacctttaccgtcaatctggtgacgccggataacaatctggaccgcgtgctgtatatcggcctgacgctgcgcctgccagatgaagaaacacgccgccggctgaacgattttctgccggaagtgcgtagccgtctgctaatgctgctttcacggcaggaagcaagccaactggccaacgagcaagggaaacagcaactggtggcacagattaaagacgtgctcagcccaccgctggtaacgggacaaccgaagcaagtggtcagcgatgtgctgttcactgccttcatactgcggtaattaaccatgggcgacaatattctttcacaggccgagatcgacgcactgctcaatggcgacagcgcgggggatgaacccgccgccgtcatcggtaatgaaagtgaggtcaaaccttacgatcccacaacccaacgccgcgtggtgcgtgagcgcctgcaagccctggagatcattaacgagcgttttgcccgtcagtttcgcatggggttgtttaacctgttacgccgtagcccggatatcaccgtcggggcgatcaaaatccagccataccatgaatttgcccgcaacctgccagtgccgaccaacctgaacctggtccacctgaatccactgcgcggcacggcgctgtttgtgtttgcccccagcctggtgtttatcgccgtggataacctgttcggcggcgatggccgttttcctaccaaggtggaaggccgggaatttacgccaaccgaacagcgggtgatcaagcgcatgctgcgcttggcgctggacgcctacggcgatgcctggagcgccatctacaagatcgacgtggaatacgtacgtgccgaaatgcaggtcaagttcaccaatatcaccacctctcccaacgatatcgtggtaaccacgccgttccaggtggagatcggggcgctgagcggtgaattcaatatctgtattccattcgccatgatcgaaccactgcgcgagttgctgactaacccaccggtggagaactcccgccaggaagacagccagtggcgagaaacgctggtgaaacaggttcagcattccgaacttgaactgatagccaactttgtcgatatcccgatgcgcctgtcgaaagtgctgaaactgcaaccgggcgacgtgttaccgatcgataagccggaacgcctgatcgctcatgttgacggcgtcccggtattgaccagccaatacggcactttgaacgggcagtacgccctgcgtgttgaacatttgattaaccctattttgaatgccctgagcgaggaacggcccaatgagtgatcctaaacaaccgtctggcgaagagaaggactccgtagacgatctgtgggctgatgcgtttaacgagcaacaggcgaccgaaaaatccgcctctaccgaaggcgtattcaagtcgctggaagctcaggatgcgttgggtagcctgcaagatatcgatctgatcctggatattccggtcaagctgaccgtggagctgggccgcaccaagatgaccatcaaagagttattgcgcttgtcgcaaggctcggtggtggcgttggatggtctggccggtgaaccattggacattctgattaacggctatctgattgcccagggcgaagtggtggtggtcggcgacaagttcggcgtacgcatcaccgatatcatcacaccttccgagcgcatgcgccgcctgagccgctgatgaaccccaacgccagcgtgcagacgcaaagcactcagcagcccgtcggtacggcgctgcccaccggctcggtattgatgcaggtcagcagcgcgctgggcgctattttgttgctgatcctgctcgctggctggttgtttcgtcggctgggctttgctccgcaggcccgtggcaatcaaaaattgctcaacctgcgtgccagttgtcaggttggccaacgcgaacgcgtggtggtggttgaagtggataacacctggctggtgctgggcgttacggctcagcaaatcaccccgttgcacaccctgcccgcaccaccggtacaggaagcaaccgaccataaatcaccggcagatttccgccagctgatgcaaaacgtactaaaacgcccggataaatcggcatgaatccattctccctccgccgggcttttggcccgctgctggccgctggcctgctactgctcagccctgccgctttggcacagttgccggggctgattagccaacctacggccaacggtggccaaagttggacgctgccggtacagacgctggtactgatcacctcactcagcttcctgcccgcaatgctgctgatgatgaccagcttcacccgcatcatcatcgtgctggggctgctgcgtaacgccctcggcaccccgtcggcaccccccaatcaggtgatgctggggctggcgctgtttctgaccttctttatcatgtcaccggtgttcgacaaggtgtaccaggatgcctatctgccgttcagccaggacaagatcagcatggaagtggcgatcgacaaaggttcgcaaccgctgcgcgagtttatgctgcgccagacgcgggaaagcgatctcgccctgtatgccaggctagctaacctgcccgcgttggaaggcccagaggccgtcccgatgcgtattctgttgcccgcctatgtcaccagtgagctgaaaaccgccttccagattggttttaccgtgtttattcctttcctgatcatcgacctggtggtggccagcgtgctgatggcgctggggatgatgatggtgccgcccgcgactatctcgctaccgttcaagctgatgttgtttgtgctggtggatggttggcagttgctgttgggttcgctggcgcagagtttttatagctagatcggtgttggcccctcgccctcgccctcaccctctccccccggagaggggaccgatcgncgatcgagcttgctgaaaatttagttatccatctgaaagaaaagaatgactaacagcacaatattctttccgaaagagcacagactagccccctctccctttgggagagggttggggtgaggggcagaacgcaacctcccatattggagaaaagagatgacacctgaatcggtaatggcgctgggtacggaagcgatgaaagtggcgctggcgctggccgccccgctgctgttggccgcgctgttcagcgggctgatcgtcagcctgttgcaggccgccacgcaaattaacgaaatgacgctgtcgttcattcccaaaattctctccgtggtcgctaccctgatcgttgccgggccgtggatgctcaacctgctgctggactacatgcgcatgctgttcagcaacctgccgaacctgatcggctaaccatgctgacctttgacagcgcccaactcagcgtctggctcagccagttcttctggcctctgctacgcgtcctggcgctgattagcaccgccccgctgttcagtgaaaagcagatctccaagcgggtgaaaatcggcctgggcggtctgatcgttttgctgatcgctcccactctgcccaccagcaatatccccctgttttccgtcaccggcctgtggctggccgtgcagcagatcctgatcggcgtggcgatcggtttgacgatgcagttcgcctttgcggcggtgcgcctggcgggtgaggtgatcggcatgcagatggggttgtcctttgccaccttcttcgatccctccggcggccccaatacgccgctgttggcgcgcctgctgaacctgctggcgatgctattgttcctaaccttcgatggtcacctgtggctgatctcgctgttagccgacagctttcacacccttcctatccaggcgcggccgctgaacggcaacggtttcctggcgctgacccaagcgggaacgctgatcttcattaacggtatgatgctggcgctgccgctgatctgcctgctgctgacgctgaacctggcgcttggcctgctcaaccgcgttaccccacagctttcagtgtttgtgatcggtttcccggtcacattaaccatcggcatgttgacccttggcatgatgatgccgatgctggcccccttctgcgagcacctgttcggtgagtttttcgatcgactggcggcggtgatcggcggcatgaccccttaacgctgaggttacccgcgagacaaactagcagggaaagatattttccgagataaaaagttgaaaaagcgaaattaaccagatttagcggcgattattctgccgggcttgaataataaaataccccccttagaatggcctcattaaataaatcccatgccgtataaaaaagcggtaaaagaccattaaatgggtcacgtgatttattaacactaacggaacaccaagaaaataaaataaccgcaccttagggcggcggaattttatttatctcaatatagccaggagcatcaaatgaaagcgaaaactaacaggaaagcacgcagagccttgggcatggcgcattggaccactaatcgcattcagatcacggcgtccgcctgcggaaaaatctggaccgtagccaaaaagaaaaaataatctgtttttaatgcgtgacgttaaaaatagcatgatcgcttatccagcctgaatatcctgacgattcccgccgttaaatcaggctgtgcaaaaacggcactgcgctctatatccacgttatagggcgcagtgccctataccctgaatatagacattatctagaattaataccctatggatttcaagctgcagcgttgttacctgcagcttgaaagacgacgggtattatcgattcatttgaaatagcgacatcccctgcatatcgctgaaggtcttatacgatgcctgcaaggccgcctgttgcatgtagtaagacgagatcgcctccaccacatccgcctcaaccagcgcggtcagctgatttttgttagccgtattgttttcgataccgatgctgtccagcacgtccaactcttgcagttgagtccccagcaccgcgttggtgctcagcacgttgttatagctgttatccagaccacgggttgccttatcgagcgccgccgtcacctgtgcgcgagtagcctcatcggccccttgcagcggggttttcaacgctttcagcgccgtgtcgatactctcgaacacgtttgtttcggaagcgctgccgtccggctccggtttgatattgctggtcagcgacataaatatcgagctaccggtgtggcccactgtcatggtgcggttggcatccactttctgctcaatggccgagttgctgccctgataaaccaccttgccgccctgctcgacaaacggggctttgtcattggcaaagccagcaaaaatgaaacggccgttaccgtcggtactgttggcctggctgagtagctgatctttcagcccctgcaactgggtggccaaagagtcacggtcattatcgctgagcgtgccgtcaccggcgttgacgatcagcgttttcatgtccttgatgccgtcggcagcgctacgcagcacggtttcttccatcgagatattctgacgggcaaaggtgcgcgccagcgcgtactggctgttttctgacatcgactgcgagatcatcaccgcctgtgacgccgctaacggatcgtccgaagggtaaagtacgcgcttgccgctggaaagctgctgcccggactgcatccacagagactgattattggtgacccccgacagattctgctggtagatcatgctggtgctcatgcgcatgggttggattcctcactaagggcatccgcagccggtatcccggctgcagttaacggtaaaatcaacgaatattcagtatggcgtcaaacaacgagctggcggtctggatcacctgcgcattggccatgtaatactgttggaaacgcagcaattcgccgtactcttcgtccaggttaaccccggagatggactgctgttgggtttgcaattgggtcacaatattggtttgtgcggtggcgttgaccttggcggtagcggtctggttacccacgctgctgaccaatccggcataggccccgttcaaggttgctttaccctccaccgctttggcggtttgcagatcgagcagtttcttgacgttgtcgttatcacccttaccgccatcttccgttcctgcggctgcaaacttggccgagtcgctgatcgcgaccttcagggttccggccacatcgctaaccggcttcacggtaaagctgtcattcttttgcgcgttgcccgtcacgccgacctgcaggccatcaaagctcagcgtcggtttgccatccgcatcagtgcctgcggtggcaggcactttgacgttgtcggacaggcgcgtaacctgccagttggcaccgtcaaactccatgcggtagtcgctggccttgaccttgctggtatcggtaaaggagaccgacagcgaggcattgccggtgttgttggtattgttgaccgtacgcccacccgagaagctgaagaaatcttcccccggatcgccgttgatatcaaagccttcgcgatgctgctggttaaagctatcggccagcgccagggccaattgccccaactggttacgtgcgccgtccagtgattcactgcggaacttcagcacgccgctgacgctgccgctaccaatctggctttccggaatttcgctggcgccattgccgcgatcgtaacccagcgtcaggcgggacgggtctttgctggaaggcatcgccgtcacctgataggaggagttgccttgcaccagcgtcaagccgttggcgaaggtcacggtataggcatcaccgtcctgctgagtgacctgaacgccgaccactttgttaagctctgtcaccaactgatcgcgctgatccagcaaggcgttcggctcgctgccgccgctgctggcccgcacctgggtgatttcgttattcaaacgggcgatctgctggctgtaagtattgatctggttggcgctgtcgctcagttgctgattgacgcccgcatccatatcgcgcagatatttatccgcattgttgaactgattcaccaggccgttggccttgcctaacacggtctgacgggctgcgtcatccccggcattgctgacaacgttttgcaggtttttaaagaagtcttccatccccgatgccagggtgttggttttggacgccagcaggttgtcgatctgggagactttttcgaagtagctgctctgggccgaagcttcgctttgcgctccgcgcagctgggtcatgatgaactggttatactcgcgattgaccgtagtcacggtggctccgttgccgataaatccgttcatggtacccaggccgccgttttgcgccaggatcgcggtctggcggttatagcccgccacgttgtagttggaaatgttattactgacggtgctgagcgcaacctgcgccgcattcaggccactcatcgcggtattgattaagctgttggacatagaggttccttatgctgcggtgccagcggcccacagaggtcaaaaattgtgccgggcgttgccatccagcctgtttgggttatcggccatctgacggcaaacttgagtaaaaaaatgggcgctgcatgcagcgcccgacagctaaaacagatcctgcaaatcgtgggtataggctttggttacctgctccccggcgtttttcatctgctggatcatgctgaccagctttttggcatacagcggatcggtcgcatagccggccttttgcagcgcatgtgccgcctgctcggggctgctggcactggcaacgttggcgtaacgcgggttgttggtcagcaatttgacgtaatccccaatcgcttccatataagagccatacacgcggaagcgtgccttgaccttcttcgccaccccttcctcgaactcggtagtggtgatctccgtcaccgggccatcccaactgctaccggccttgataccaaacaggttataactgcgtgagccatccgccgccgggatctcgcgttgcccccagccagactccagcgcagcctgcgccacaatcaactggtgcggaataccgctttgctggctggcaacccgtgccggaatggacaactgcgccacaaagttgccgttgctcaacggcaagggaggcgccgaaggtattttgggcactgcccggcggaccatctgctccaatgcctgacgcggcagggtctgtaacacctcgttgtccagcgccatcggcaccgtccctgcggtttcgcttgggcggctgtttccggcggagagctgcttgaccatcatgtccgccagccccaggcctttctgcgacatctgttgggcgatttgctgatcgtacatcgaggtatacagccgcgtctggtcgctgctcaacacgccatcctgcggcaatgccgcacgcatgcttttcagcatcatctgcacgaacataccttccacctgctgggccacctgcttgatattgccctgcggatcggcggcaacatcgcgcttcaagccgtttagcgactgggtgtcataggcagcccccgacatggccatcagatcgctgctcatcagataatttccagtttggcacgcaggcaaccagcgctctgcattgcctgcaagatagacatcaggtcgatcggcgtcgcccccagcgcattcaacgcgcgaaccacgttattgaggttggcactggcgttcactttttgcagcgaacctccctgctgctgcacggaaatctgggtattcggcgtcaccacggtctggccaccaccgaatggcgtatccggctggctgacggtgttttgccgatctaccaccaccgacaggttcccttgtgccaccgcgcaggagtccagtaccacatcgcggttcattaccaccgaaccggtccgggagttgatgatcactttggcatccatcgccccaacgttaatgctgatattctgaatatccgccaggaagcgcacctgcgaactattgccgcgcggcaccaatacctgcacggtacgggaatcgagcggagaggcggtgccaccgccgcgctggcggttgatggcgtcgctgatctgttgtgccagggtgaaatcatcgtcgttcagttgcaggttgatcacgccatcctggccgaaggtggtcggcaattcgcgttcgatggaagcgccgttgctgatacggccaccggccaactgattgacctgcacgctgctgcccccggaggacgcaccggccccgccgaccagcacgttaccctgtgccaacgcatagacctgattatcaacacctttcagcggtgtcatcagcagtgtcccgccacgcaggcttttggcgttacccattgaggacaccaccacgtcgatattctgccccgcacgggagaacggcggcagcttggcggttaccatcaccgccgccacgttttttaactgcatgttggtgcctggcggcacggtgatccccagctgcgacagcatgttgctcaggctctgggtggtaaacggggtttgcatggtctggtcgccagagccgtccaatcccacgacaaggccgtagccaatcaacgcgttgtcacgtacgccctgtaccgtcaccagatcgcggatgcgttccgccgtcgcgggcaggcaaaccagcatcatggacagtgtgagaagaaactttttcagcatcggtcaatccttagaacggtgaaacatttaagaagaagcgctgtagccaccccatggtctgcgcttcattgatatagccgttgccgacgtattcaatacgcgcatccgccacctgggtggacgtgaccgagttattgccactgatggtgcgggggttaaccacaccggagaaacggatgaattcggtgccctgattgatggcaatttgcttttcgcccaccacgtgcaggttgccgttggccaagacctgattgaccgtgacggtaatggtgccgttaaaggtgttgttggcgttcgccccccccttgccgccgaaggtgctgtcgccggagatatccatgtcggctcgcgcgttaccaagcagcccttcgaggtatcgcggtgaagtggctacgccaaatttgctggccccattgcggctggcgttggcggatgaactcttgctggcgctgacgttttcttgcagcacgatggtcagggtgtcgccgatattacgcgggcgacgatcttcaaacagcggctgatagccgtagttcatcggctgtaccgtctggaaaatcgaaccgttcggcaccggagcgcctgccggagcgggctgagccgtggtagctccgtcaaccaggggggtatgcggaatataggcacagccgccgactgtcagcatcagcagcccggccaggacgcgtttgccttgctgcggcacgctggccgctaaaaaggtggttaccacgggtatcgcctttgttgctcaggataaggattacgggcgcagcctgctgcgcccgtcgattacagttgcgtcagcttttgcagcatctggtcagacgttgataccgctttgctgttgatctcataggcacgctgggtctggatcatgttgaccaactcttccgccacgttgacgttagaggtttcaacataaccctgatacaacaggcctgccccgttgaggccaggggtactttcgttaggtgcaccggagctttcggtttcctggtacaggttttcacccatgctttccaggccgctatcgttgataaaggtggtcaacgtcagttgcccgacctgctgcgccgccgtctggccctgctgggtcacgctgacgatgccatcacggcccacggtaatgctcagggcgttggccggaatggtgatcgccggttgcacctgaaaaccactggcggtcaccaactggccattctgatcgatctggaatgaaccatcgcgggtataggcctgggtgccatccggtaacaccacctggaagaagccctgccccttgatcgccacgtctttgctgttgttggtctgcgacagattgccctggctgtggatgcgctcggtcgccaccgggcgtacgccggtaccaatctgcaaaccggaaggcagcgtggtctgctcggaagactgagctccgggctgacgcatggtctggtacagcagatcttcaaacaccgcacgctggcgtttaaacccgttggtactgacgttcgccaggttgttggcgatcacgtccatattggtctgctgcgcatccagaccggttttggcaatccataaggatgggatcatgatttattcctctgcactcagctcattgacagcaatgagttggcgcgctgtgcgttttcatccacgctgtggatgaccttcatttgcatttcgaaccggcgagcgttggcgatcatatccaccattgtctccagcggtttgacgttgctgccctccaacactcccggcatgatccgcacttcgggatcgttcggtagttggttgccacgctgctgctgagcctcggcagtcagatggaacaggccgtcgtccccgcgcaccacttcccgcgcatcggccttcaccagcttcaagcggccaatctgggaaatggtgtttggcggatcgcccggatttaacgccgagatggtgccgtccgccgccagtgtcagttctgcctgcggcggggcttcgatcggcccaccatcacccatcagcggcacgccctgcaccatcaactgcccggtggaagagatctggatgctgccgttacggctgtaagcttcggtgccgtccggcagccttagcgccagaaacccgtcctgctgcaatgccacatccagtggccgcccggtgtagttcagcggcccttggctcatgtctgccccaggcgtcgaagctgccaccagcgtacgggtctgcatgcttggcccatcaaccggcactgcacgcagtgccgaaagctgtgcgcggaaccccggcgtggaggcattggccaggttgttggccgtgaccgactgctgctccagcgtctgccgggctccacccatcgcggtataaatcgcgtgatccataaatcaatcctattagcgcaggctgaccagcgtttgcaggatcgaatcctgggttttgatggtttgcgcgtttgactggtagttacgctgtgcgacgatcatgtttaccagttcctgactcagatcgacgttggaagactccagcgctccgctggtcagtgaaccgaaaccgccaccgcccgccaggcctacacgtggctgacctgaagcaccggtctccttccagacgttatcaccctgtgaggccagcccttccgggttggagaagttggtcaacacgatctgccccagcaattgggtctgctggttgttgtataccccgaccacggtgccgtctttgttgatctggaagccctggtattccccggtggcatagccgtcctgggaaatcttgctgacagagtcactaccaacgttctgttgcaggctaccggcaaagctcaggttaaagttttgcgccagcgcgccgtctttagccgacattggcacgaccaggttgaatggcgtggcgcttggtgtgccatctggcttcagcgtcccggtcagcgtaccgctgttgtcaaagttcaggctgcccgctttggcagacggagcacctgtcacgctgccgtcctgggtgtaaacgtcccacttgttatcagccgttttaacaaagtaggcgttgatgttgtgtgcattgcccagggtgtcgtaggtggtaatggtgttgacgtagttaaatgagtcggtcttgttgggatcgaaaggcgtcaccgccggtggcttatgggtcgatttcaggttggccaccatattgccgctggtgctggctttggcgttcatcatgccttcagggatactcagcggtaccggatcggccccctgctggatggttggcggcgaaccagccgccgggtagccggtcaggctcaacccttgcatgttggtgatgttgcggttggcatccatgatgaactgcccattacgcgtatagaagatgccgccatcggcgtcttgcatacggaagaagccgttctggctgatggcgatatccattgcccggttggtgttggtggtagtaccgccgttgaagttctgggtgatccccgccactttcacccccagcccgacctgcgagccagcaaacatatcggcaaaggatacgctgccggatttaaagccataggtggcggagttggcgatgttgttaccaatcacatccaggttggttgcagccgcgtttaaaccgctgaccgcttgagaaaaagccatgtcgttctccgaaataggtcatttaaaaaggtgtcttcaggatcgagcgatccattgccgacgtggaaaatcactgcgcttagtttgacgaacccagtttggacaggatcaggcgcacgtcatccagcgttgaggtccccgccacgcccagatccagttttgccccatccgtaccgcgcgtgacgccgttaaccatggcgaaacgcagtggttgcgccaccaactgctcaccaccgtttttggcgttgatcgccacggtgtaagagccatctggcgcattggtgccatcctccagcgaaccgtcccaggagaaggagtgcacaccggcggtcagcccgcccagatcgatggtgcgtaccactttgccggtggcatcgctgatggtcgccgtgaccgcatcggcggtgcgttccagctcgatgccaaacggcgtggtgctgaccttgccagcgtcattccccaccaggatctccttgcccggcaccatcacgccgtggccaatcagcgaactggcctggattgactggttgccgctgatctggccggagatcgaccccagcgtggtgttgagcttctcgatcccgctgaccgtattgatctgggccagttgggtcgtcagttcgttgttttgcatcgggttggtggggtcctggtttttcaactgggccaccaacagcgtcaggaaattgttgctcagatcctggctggtattgccattcgcaccgcttttggcgccggtaccggcaatgctgttgtcgagtgattcattggtggtggcggcaatggccataaataaaagctccggttactgacccagcgtcagggttttcatcaacatggatttggtggtattcaacacttcgacgttggcctgatagctgcgcgaggccgagatggtgttgaccatttcccctacaacatcgacgttgggcatccgcacgtagcctttggcatccgccagcgggttgcccggctgaaacaccaagcgctccggcgaggggtcgtctactacctgcgcaacgcgcacgccaccggtcgactggcctggtgccgccgcgacctcaaacaccacctgtttggcccgataaggctggccatccgggccggtggcgctgtcggcgttggccatattgctggcgctgacgttcagacgttgggattgtgcggacagggccgaaccggaaatatcaaaaatattcaataacgacatggaaattatcctccttgcagcacggacatcatgcctttgatctggccgttcaacagcgtcaggtcggtttgatatttcaggctgttatcagcaaagttggtgcgctcacggtccatatccaccgtgttgccatccagggaaggctgatccggtacgcggaacagaagatccagcgacggtggctgcatattctgcgccgggatatggcgagccgaggtcaggttcagcgcaacgccgctgccgttgacgcgcccctgttccatgaccttgctcagttggctggcgaaatcgatatcacgagcctgatagcccggcgtatctgcgttggcgatgttggccgccaggatttcctgccgctgggcgcgcaggttcagcgcctcctggccaaaacgcagagcagcgtccaatttgtcgagcatgctccctccgcgaggttagaatttggagccgacagcataaacgccctacctgtcagcctatcgtgggaataagggcaaaatgcgtcgctatttgtctgcttagcctgcgcgcgtaacggttacacttgtccccctgtggtcgctgcgtctgtgaggcaaaatatgaaaaggatcctgctgtgggtcggcttgctgatcggcctgaacgcgcacgccgagggcctggacggacaggtggagagctttatcaagtctcaatttgccaccagtaccaacgtgaccgacgtcaaggtgctggtacgcacgccagcaagccgttggccgcagtgcgaattgccgcagctttcgatgcctcagaatgctcgccgctggggtaacatcagcatctcggcccgttgtggccaggagcgacgctttattcaggcgcaggtgcaggtagcgggacattatctggtggcagcacgggggatcagtgctggcagcaaaatcacggccaatgatatcaagctgaaaaccggccgattagacaccctgccggcgcgtaccctgaccgataacgccaaggcgatcggagccgtcagcctgcgcaatatcagcccagggcaacccttgaacatggtcatgctgagacgggcctgggcgatcaaggccgggcaaacggtacaggtgatggcgcagggcgatggatttaatatcagcggcgcagggaaagcgatgaataacgccgccgccgaagacagcgtgcgcgtgcgcatggcctccgggcagattgtcagcggcaccgccaatgacgatggcacaattcgtattactctataaaaaaataaagctttgccaatacttgtcgataaccaagtcatagcagcatttatccggccaccagggccacagatttgaattccccgttgcctcggcgacggtggtacagatggagattgaacatgagtatcgatcgtacccaacggttgcaacccgtacccacggtgcatccgcgagaaacacagacagacagcacgttgcaagcgcgtaaaaaggtatcgacggaaactgcggtcagcggcacccaggttaagctgagtgatgcacaggctcgcctgatgcagccgggtagccaagatatcaatatggagcgagtggaaagcatcaagcaagcgatccgcaacggcgaattgaagatggataccggcaagattgccgacgccttgttacaagacgtgcaaagcgaatggcagtccggcgccgatcggggttaacaccaagggtgagtcattgatatggaaaacctggcacaactgctggataagctgctggacaccttgcaggcattaggcacggtgcagacggaggagcacactttactgtgctcgaaaaccttggctggcgtggctctgcaacgcgtgaccgatgctaaaagccaactgctggcgacggtcaattatctggaccaacagcggctggagatggagcagctgcaacactgccaggcaccttatgatggccaaccgcagttggcgacccgctggcagcaagtgcaacagcaaagccagcaactgcgcgaacagaatcaccataacggcatgctgctcaatcatcatattgagcacaatacgcaggcactggcgattttaaacaagcaaaataaatcgctgtacggccccgatggccagtcccgcgcggggagcctgctgggccgtaagattggggtttgagcacggcccctcaccctagccctctcccaaaaggagaggggacagaacgtgccacaactctgctactgagtctacatctcataccattcccacaatttcatttgcacctgagctagcgccagctggaattggctcctgtacctaactgtacgaggatcgctttatcgtggttgccagccagttgctggcgcgagatttgttacagcgcggcgtgttaaccgcgccgttcgagatgtcattacccggtgcccgctattacctggttaccacggaagaaaatgcgcaacgcccggatatcattgcgttgcgcgactggctgttgaggcaaataacgccagggatgacttatcatcctcactcatagttcacaatcacctgattagagattgcccgcagcggaggatttaacgcgccgcgagacttcacgtaataaatgaagcggaactcgctgtctgcgggaagaccgttgaaggcctcactacggccactgcccgcacctagaggcaagcaacgtgacgaggtacaaagctgtacctgtaatccggctggcgcacctgccagcaactgataacgccagcttacgctggtcacccgagcatccgccgccggtggattagctggccgcaggctgggggaaacatcacgcacgctccccgtttccagcgtgacgccgctggtatcggcggcccaagagccggacaccgcctgcgcagccaatggagcgaacaacactaacaaaggaaggaaagctttcatcaggcggctcctatggttgaggtcatgcggatctgacgttcgtcgttgatttccaggttcgacagcaccaccaactgcggcaaagtacggcgcaggaagcgggccaacagggcacgtaacgcatggtttaccagcagcaccggcggtgcactgagcatttcctgacgctgcagcgcctgtttggcctgatccaacaagcggtccgccagacccggttcaagacctccgcccccttgcagagcctgcaacagcaggcgctcaagcggcgtatccagaccaatgacctggatctcaccgttacctgggaaccactgctgggtgatggcccgcccaagcgccacgcgcaccacggaggtcagttcgaaaggatcgctttgcgttggcgcatgttccgccagcgtttctataatagtacgcatgtcgcgaatcgacactctttcggccagcagattctgtagcaccttgtgcaacgtggtcagcgaaactacgccaggcacaaagtcctccgtcagtttcggcatctcctgcgagacacgatccaacaattgctgggtttcctggcggccaaacagctcgctggcaaactgaccgagcaaatggttaaggtgagtggcgactacggtgctggcctccaccaccgtgaacccctggatctgcgcctgttcacgcagtgcgctatcgatccacaccgcctccagcccgaaggccggatcgacggttttgtcaccggccagctcacccaccgcattgcccggatttatcgccagccagcgccccggatgtgcttcaccgctgccgatctccacccctttcatcagaatgcggtaactggccgccgacagttcgaggttgtcgcgaatatgcaccaccggcggcagatagccggtatcctgagcgaattttttacggatgccacgaatacgccccagcagctcgccgttttgctgaaagtccaccatggggatcaggcggtaaccgacttccatacccaacgggtcctccagctgtacatcagaccagctggcctccaccgcctgcggattttcctgcggcagcggcggctctttgactttcggcgcctgctgttcacgcccgcgtaaccgccaggccagcgccagcagtgccgccgtgaacagcaggaacaccaggtttggcataccaggaaccatccccaacagccccaataccccagcactcaacaccatcacacgcggattgttgaacagctggttgaccatctgctcgccaacgtcctcatcggtcgctacgcgggtgacgatcacaccggccgccgtcgagatcaccaacgcagggatctgggcgaccaggccatcaccaatggtcagtaaggtataggtttcagccgcggtacccaactccataccgtgctggatcacgccgaccaacaggccacccaccacgttaatcaccatgatcatcaagcctgctaccgcgtcaccgcgcacaaacttgctggcaccgtccatcgaaccgtagaaatccgcttcctgcgtcacttcggaacggcgctttttagcctcgtcttcgccgatcagcccggcgttcagatcggcatcgatcgccatctgtttgcccggcatcccgtcaaggacaaaacgggcgcccacttcggcaatacgcccggcccctttggtgatcaccataaagttgatcagcaccagaatgatgaacaccacaataccaatggcgaagttgccgcccaccaggaagtgaccgaacgcttcaaccacccgccccgcggccgccgcgccggtatgcccttccatcaggatgatcctcgtggaagcgacgttcagcgataggcgtaacagggttgagaacagcaggatggtcgggaaggcggcgaactccagcgtccgctgggtaaacatcgccaccaacagcaccatgatcgacaaggcaatattgaaggtaaacagcagatcgaggataaatgccggtaacggcagcaccatcatcgacaggatcatcaggatcagtatcggcccagccagcacctgccactgcgtatctttaaaattacccggcaaacgaagcagggaggccaaattagccatctgagttattctctccagcaaaatccagtgcttcaggcaccggtaaacgttgaggttttttcgggatcaggccaccttcacgctgccaacggcgcagctggtagacccaggccaggacctcggccacggcggcatacaaggtcgtgggaatgtgttgcccaatctcactgtgacggtatagcgcccgcgccagcggcggagcttccagagtcgggatacggtgttcattcgccaattcgcggatacgcaaggcgatctccccagcccctttggcaaggacttttggcgcgctcatgttcttgtcgttgtattgcaatgccacggcgtaatgtgtcgggttggtgacaatcacgtcggccttcggcacgtcggacatcatgcggcggcgagagatggcccgctgttgctggcgaatacgccctttgacatgaggatcgccctcctgctgcttatgttcgtcgcggatttcctgcttggtcatcttcaatttcttgaagtggctccatagctgataaaacacgtcgaaggccaccatcggcaccagcccaaggacgatcagcatgccgcagaagatcacaatctgtagcgcattgcgcagtgcgtcctgcggttgctgggtgaccagatgcagcatcgccgcccagttgtgccacaggtaaagcccggctacccaacccaccagcgtcgctttgagaatggccttcaacaactctgccagcacctgggtggagaacatccgttttaatccggagatcgggttcatgcgcttggcatcaaacttaaggctgaagcccacgccacccagcagcatcggggccgacagcgccaccagcaccaatccagcgaggatcggcatcagcgcccacaccgcctgacgcagcagcatggcaaactggcgcagcatctgcttatcgttgctgaccatgttgtgatcaaaatgcagcccttccgataacatcctcgccaactgttgcgcgatatggccgcccgctacccacaagatcgacaaccccgcgatcagcatcaggatcgaagtcagttcacgcgaacgcgcaatctggccctcttcacgcgccttttccagccggtggggtgtgggggcctcagttttttccatatcactgtcttcggccaaggcgagggttcccatgcgtgcgaagaatagaattgccgccagcatgccaaaaaaatgcagatttcattgcgggaacaacggcgcaaaaggccggttatttcggggatgggctagcgaaaagatttagggcgcagggtgcgccctaataaatgatcaaaaacccaggctgtcgagcagatcgtccacctgggcctgattggcaattacgccagccccgttctgatccagctgcgggccattgagcagactgtcgttcggccttttctctttggcaggctgatccgggatgttttccatcagtaccatcagcagctgcttttcaatctcctgcaccacgtccatcatgcgcttgatcacctggccggtgagatcctggaaatcctgcgccatcatgatctccagcaactgggcgttggtgaatgcggtgtgctccggcacccgatccagatactgacgggtatccgtcaccagtgaacgggcatctgccagctcgatagggttggcaaaccactcgtcccagcgcccttttagcgtattggcctgcgactccaactccgcctgacggggttgtgccgcctccacgcagttgagcgcccgctccgccgcctgcgccgtcatggtgacaacataatcaagacggtcgcgcgcgtccgggatcgcttcggcagcctgagcgatagcctgatctagccccagctcacgcatgctgtcacgcagcatgcgggtcagttgaccgatgcgggagatgatctcacccgctgtcgctgcatcgctggcaggcattggaatatctctcatcgccctctccttttttacatgcccagtttttcaaagatcttgttgagcttctcttccagcgtcgccgccgtgaagggtttcaccacgtaaccactggcacccgcctgagcggcagcaatgatgttctctttcttggcctctgccgtcaccatcagcaccggcatagatgccagcgcaccgtcggcgcggatggtttgcaacagctcgagaccatccatgttcggcatattccagtccgataccacgaaatcgaagctgccggcgcgcagtttgttcaacgcatccgccccgtcttccgcctcttcgacgttgttaaaacccagttctttcagcaaatttctgacgatgcggcgcatggtagaaaaatcatccaccaccagaaatttaaggtttttgtctgccattattgctcctaaggttaatcatttttgccccgtggttaggggcataacatcaaatacgcagcgcctgaccacccgcgatctgcgccaacatgcgttggctcatgcgctccaattccaccacttcattgactccgccggtggcaatggcctcacgcggcatgccaaacaccacacagctggcttcgttctgcgccagggtgtacgccccggcacggtgcatttccaacatgcctgccgcaccgtcattccccatgccggtgaggatcacccccaccgcattgcgccccgcaaactgggccaccgaacggaacagcacatcaaccgaaggacgatgccggttcaccggcgggccatcatgcagccgaacctgatagttggcaccgctgcgcgtcagctccagatgacgatctcccggcgcgatataggcatgaccaggcaacacgcgctcgccgtcttcggcttcttttaccgtgatctggcacagcttgttgagccgctcggcaaacgaacgggtaaaccctggcggcatatgctgggtgatcaataacgccgggctggtagccggtaacggctgcaagacgtggcggattgcctcggtaccgccggtagacgccccgatagcgatcagcttctcactgctcaacaacggcgtatggctgaggatctccggagccggtgccgttgaacgctgcggcaggcgcgccttggctgccgtgcggatcttttcggcaatcagctcgctataggccagcatgccttcgcggatccccaactgcggcttggtgacaaaatccactgcgcccaattccaacgcccgcagggtgatctccgatccctttccggtcaacgacgacaccatcaccaccggcatcggccgcaggcgcatcagtttttccagaaaatccagcccgtccatacgcggcatttcgacgtccagcgtcagcacctgcgggttgaattttttgatcaaatcacgcgccaccagcggatcgggggcggtcgccaccatctccatatcgggatggctattgacaatctcggtcatcagctgccgcatcagggcagagtcgtctacgcttaatacgctgattttattcattacctctccttggtcaggccatacacggtctgcccacgcaagtagaaatcccggctgagctggctaaagttttcggaatggccagcaaacatcaggccccccggtttaagcagcggcacaaagcgccgcaaaatgcgctcttgtgtttccttgtcgaaatagatcatgacgttacggcaaaatatcgcatcaaattgccccggcaacgcccattcaggggccagcagattgagcggctggaaatgcacctgtgccgccagttctggccgaacccgtaccagaccatggtgaggcccggtccctcgcaggaaataacgctgcatctgcgccggtgtcagggtgcgcagatcttcctggcgatacacccccgcttcggccttttccaatacctgagtatcaatatcgctggcccacacctgcgtccccgtcgcccgctgccccagcgcctcattcaaggtaatggcgatcgagtaaggctcttcaccggtcgaggcggcggtactccacacggagtaaccgttgggtcgcgaacgcgcatgttccgccaggatcgggaaatggtgcgcctcacggaagaacgccgtcaggttggtggtcagggcgttgacgaatgcctgccactcggcgctgttggtgtcactttccagcagcaccagataactaccaaaatcgggtattcccagcagccgcagacggcgaaccagacggttgtaaaccatctcgcgtttgtgctcggccaacacaataccggcacgctgatagatcaactggctgatccgtcggaaatgcacatccgacaggggcagccgttgcaccatctgannnnncccgacgggggcagccgttgcaccatctgagtcagtaaagacgcaggctctttattggtgggtgaagaggaactactcatagcccttcactcaatgggttgttacttgccatacaattcgacactagttgcttcctttgccactgataaaactccgttgttaagactttctgataaggtgatgttgtcgtccgccaggcggaataccgctaccgcatcggccagcgtaatagcctgctcttccaatgccgccgccgcagaggccgcttgttccaccagcgcggcgttctgttgcgtcacctgatccatctgggtcacggcctgagtgacctgctcgataccgcggctttgctcatcggaagccgaggagatctcgcccatgatgtcggtaacgcgggtcaccgaacgcacgatatccttcatcgtggcaccggagttttcgaccaacaccgacccttgcttaacacggccgaccgactcatcgatcagcactttgatttctttggctgcctgggcgctacgctgtgccagattgcgtacctctgccgccaccacggcaaagccccgcccttgttcacccgcccgcgccgcttcaaccgccgcgttcaatgccaggatattggtctggaaggcaatgccgtcgatcacgctggtaatggcgccaattttctgcgagctgctggcaatatcgtgcatggtggtcaccacatcgtcggccatttccccgcctttggccgcggtggctgaggcatcgcgcgccagctttgaggcctggcgggcgttgtcggcattctgtttcaccgtggcggttaactgctccatactggcggcagattcctccagcgacgcggcctgctgttcggtgcgggaagagagatcgttattaccttccgaaatctcctgtagcccgatcaggatcgactcggcaccttcgcgtaccgcacccactgtgccaatcaacgagttctgcatgcggtgcaggctggcaaacagctggctgatctcgttgcggccatacacctggatcggcgcggccaggtcgccgtcggcgatacggtcaaagtggctgcgcataatattcagcggctgaaccagcatattgcgcaaccaccacatggcactggcggtcaccaggatcagcatcagcactgcgccgcacaccagccaaccggccagcgtgaaggagcgctggttggccgcattggcctgggcgatattttcgttgaccagttgcaggtactggacgaagtcggcttcgaacaggtcctgcattttctgcgtgggttgatccataaagccctgcaggttgccaccttccaggaagacgactaactcacgcaacgcaccgcgtagccgctcatagctggcttgggtggtttctgtcagttgctgctcctggtcgctgttacgggaaacggccaggaactgattaaaatagagatcggctttctgcaacgaactgcgggcgttgcccatcagagcatcgacctgctcttgcggcaatttcagcgctgcacgggtgccggcccggttcaaggtgttgcgcgcctgtagcagggaaacccagctcaggctgagagcatcacgctgctggctacccagactaatcagattaagattttggttatcggagcgggaagcggtatacgacaagccggtgctaaccagttgcatcaggcaaaaggtcagcagtaataaaaacagactggtagagatacggactcggttaaacacgataaacctccaggtagccgcgggttaacacggcttaggacggaaaaaagggccacgccttcacggaagaacgcagcccaatgccggttagaacgtttcccagttctcctgcggatcgctggcgctcatttttttatgattgattaccggggtaacgactttactgttggcggatgacttgaactcgttttggccttccgctttcagtcggaataccgcaacggactgggtcaggcggctggcctgctcttccagagctgccgccgcagaggccgattcttcaaccaaagaggcgttttgttgggtgacacgatccatttctgctaccgcctggccaacctgatcgataccacggctttgttcgtcggaggccgaagcgatttcacccatgatatcggtaacgcgggtgacggcattgacgatatcgcccatggtttcaccggcgctttccaccagcaccgagcccatatcaacacggctaaccgagtcttcaatcaggcctttgatctctttggctgcctgcgcgctgcggcttgccaggttacgtacctcaccggccaccacggcaaagccacggccctgttcaccggcacgagcagcttctactgccgcattcaacgccaggatgttggtctggaaggcgatgccgtcgatcacgctggtaatatcggcaattttctgcgagctgccagcgatgtcgtgcatggtttgcactacgttggcgaccactttgccgcctttctgcgcggtttctgaggcgctcaacgccagttggctggcctgacgggcattttcggcgttctgtttcaccgtcgcggtcaactgctccatgctggcggcggtttcttccaacgaggcggcctgctgttcggtacgggaagagagatcgttgttacctgcggcaatctcggaagcaccgctgtagatggcatcggccccctgacgcacgccgctgacggtgtcgatcagttcgccttgcatatgccggaggctggctgccaacacgcccatttcgttgcggctattgacgtcgatctggtgagtcagatcgcctgcggcgatcagtttgatgtgctcaatcatacggttgagtgggcgcaccagaatatggtggatgccgaaccagaccatagcgatcacggcaaccaccagtaccagcaccacgcccagagtccaaacggcgaattcgaaagagctgtcgccatcttcgaccgcgatctggtatagcttgtcgttctgagtcaggtagcggttatagagctgttcaaattcagtctgataacgctgagtcggctgttcaaagaaggcatccagcttgccgtcacccaacagcgggatcagttccgacagtgcagtgtgcaaagtggtataacgctgcttgagttcgtctgccgctgcggcatcctggcgagcatccagagggattttctcataggcagcgtagtgctgttccgccatgctcaaggtgtttttcgccgagaccagcagttcatcaacggtggcaccggtgcccgctttattgaggtccatcatgtagcggataccggcacgattgagggtattgcgggtttgcagcaggtttacccagctttcattcagctctgactgctgctgtcggatagtttgcagtacggtaaaattttctttgttatctttcagcgaagtgaaaaacagcccaccggaaaccagctgcaaggcaccgaataacactagcaccagcaataagctggtgaccaccttcatacgattaaacatttttacccttcttggaagcccgcacagacaagcgctgtgtacgttaactgtctgggttatcggcgtggcagaagagaactttaagaaaaatctgtaactatttttttgtattgtgcggggggtaagattttagctcggcgaagggatggcccctcaccctagccctctcccacagggagagggaacagaacgtgcgactgattagtaccgtatgcgtccttcacgttatcccgatcacagctttcccaaagggcaaaggaaacgaaagtaccactgattaactacaaccaatatcacacgttttacggattagcttctgcacctgaacacagcgccataccagcgccctctccctgtggaagaaggaacagaacgtgcgactgattaactacagccaatatcgcacgttttacagattagcttctgcacctgaacatagcgccgtaccagctccctctccctgtgggagagggttggggtgaggggaactgacgccaatacgcctcaccagttacaccatcacacacagcaacttagtcaatcagcggtgcatttaaggcaatcaggcgctttttgctacgttgtctaccagcgacatctcttcgctgctcagcagcttttcgatatccaccaggatcagcatacgttcaccgagcgatcccagaccggtgagatattccgttgccagcgtgaccgcaaactcgggggccgggcggatctgatccgccgttaacgacagcacatcagacacgccatccaccacgatccccaccacccgctggccaaagttcagcacgatcaccacggtgttttcatcataagagacgtcctgctgggcaaacttcacgcgcagatcgataatcggcacgatcaccccacgcagattggtcacgcccttgataaacgccggggtattggcgatacgcgttacctgatcgtaaccgcggatctcctgaaccttgaggatatcaatgccatactcttcgttacccaaggtaaaaatcaggaactcctgacctaccgtttcgcccgccagtttgctgacggctgccagtcctgccatttcgatcacctttaaatcagtcggttaataattatgcggcagcgtccgtcagacgcttttcccggttcagcgtttgcagcgccgatacatctacaatcagcgccacgctgccatcccccagaatggttgcggcggaaatccccggcaccttgcgataattgctttccagatttttcaccaccacctggtgctgaccgatcaactgatcgaccagcagcgcatagcgacggcctgcactttgcaaaatcaccacgataccctgggtggcttcggttttggctccgtcaacctcaaacaccctatacagctcaaccaacggtagatattcgccgcgaacctgaagcacacgctccccaccggccaacggatgcaaatcctcggcctgcggttgcaatgactccatcacggcattcaatggcagaatgaacacttcctcattcaccttgaccgacatgccgtcaagaatggccagcgtcagcggcagtaaaatgcggattgaggtgcctttcccagcctggaaatggatttcgacatggccccccatctcctgaatatttcgcttcaccacgtccatgcccactccgcgcccggagacgtcggtcacctgctcagcggtggagaaacccggggcaaagatcaacatgccgacctcttcatcgctcatgttgtcactcaccgccagcccctgtgaggcagccttggcgagaattttctggcggttgagaccagcaccgtcatcggtgacttcaatgcagatattgccgccctgatgttcggcggacaggatcagattaccgacttcggccttaccggcggccaggcgcgcagcaggttcttcaataccgtgatccaggctattgcgcaccagatgtgtcaacggatcgataatgcgttcaatcaggctcttgtccagttcggtagagctgccccgtagcgtcaactccacctgcttgtccagcttactggccagatcgcgcaccagacgtgggaaacggctgaaaacgtactccatcggcatcatgcggatcgacatcaccgactcttgcaggtcgcgagcgttacgctccaactggctcatgctgttaagcagatcgccgtggttgaccggatccagagagcctgaacgctgggccaacatcgactgagtgatcaccaactcacccaccaggttgatcagttgatcgaccttttctaccgccacgcggatgctagtggactcgctagccttggctttgggcttcggcgcttctgccgccggagcaggcgcggtgggtgtagcaacggccacgggttccggcgtgctaactttcgccacggccttcggcggtgtggaaaaggcaatctgctccggttccaacacaaagcacagcaccgcgctgatatcctcctcactggcagaagtcagtaaagtcacctccaggctgctctcggtctgctgcgggttttccacctcgcccaaattgcccaactcttccagcatcagaggaatttcatttgacttcaggccgctcagactgatccgcatcccgccttcgatcgcggccggagcagcggcatgaaccaccggtgaggttaccgttaccgccgccgcaggagcatcctgctgttgcgcttccaaagccaactgccgcaatgcctgacaaatatactcaaagctctcgctatcaggctgttgcgacgttttataggcgtccagttgctcctgcataatgtctttggtttccagaaacaggttgataatttcagtgctcaggctcatttcctgacgccgggcaccgtccagcaaattctccagcaggtgggtagtttcctgcagaacgctaaagccgaaggtggccgccccacccttgatcgagtgggcagcgcggaaaatcgcgttcagtgtttcaatatccggggccagcgggtccagctccaacagatgttgctccatatcggccagcagctcgtctgcctcatcaaaaaaggtctgataaaaagcgctaatatccatgctcacggggtcacctctgctgtgagtcgctgttagtcggtgaagtggcggaaggtgccgccggaatagccgctgtcggcccggtgtctgcggctttcaccgctgccggaggttgctctgatgtcccctgcgttgccggcagttcggcggttggagcaggtgacgacggcggtaactccggtgtcgctatagccggtgccgtcgcctgcggagccagctgcttcaggccttccggctggtcgatttccgtggcgctgctctccgcattctcgtgttctatcccctgctgggttgctttgttcagcaccagaatggtgatccgccggttaacggcatcatcaccgccgtgctgtttcaggttcatggtcgaggccatcccaaccacccgcaatactttgccttcggccaaaccaccggcgatcagttcacgccgtgaggcattggcacgatcggcggacagttcccagttgctgtaataacgctcaccggtagcataaggcagatcgtcggtatggcccgacaggctgattttgttagacaatccattgaggatcggcgctatcccgcgcaggatatcgcgcatatagctttccacctgtgcgctaccggtcttgaacataggccggttctggctatcgataatttgaatgcgtaatccttcgtccatcatgttgatcagcaaatgtggccgcagcgctttcaggcgcgggtccgactcaatcagctcatcgagtttctcgcgcagcttgttcaggcgcagctcttccgcacgcttttccggtgaatccatctgctttttgaccaacccttgctgctgggttgggtcgtccccaccgcctgggattgggctgctttccgagctgctcttgtcgccgctggttagcgccaccttcaatggggtacggaaatattcggctatctgcgtcaactcctgcgggctggcaatcgccagcaaccacatcaccagaaaaaatgccatcatcgccgtcataaaatcggcataggcaatcttccaggagccgccgtgatgaccggcatgatgggctttgcgttttctgaccagaataaccgggtgattctgtttcatgcgtcctgctcttccgtcgcctgctgtgccggagctttcaccttacgcacatgctcttccaactcaacgaaggaggggcgctccgtggtgtacaacgttttacggccaaactcgaccgcgatctgtggagcataaccattcaaactcgacagtaaggtgaccttgatgcactgcatcatcttggtggtttcggcactcttctggcgcagcaacgtggccagcggcgagatgaacccataggccaacagaatgccgaggaaggtgcccaccatcgcattagcgatcagtgcccccaattccgccgcaggccggtcagccgaagcaagcgcgtgcactacccccatcacggcggccacgatgccgaaagccggcaacgaatcgccgaccatcgccaggctcccagcgggtacctcgctctcctgttcgaaggtttcgatctcttcatccatcaacgcttcgatctcaaaggcgttcatattgccgctcaccatgagccgcaagtagtcggtaataaattccaccaaatggttatcggcaagaatgcgcggataattagagaaaatttcgctttcctgcggattatcgatatcaaactcaagcgacaacatgccctgctggcgggatttggccattagccgatacagcagcgccatcagatccatatacagttctttgttgtattttgagcggcgcatcagcttgggaagagcgcgcagcgtggatttgatcgctttaccgttgttgccgacgataaaggcccccacaccggcccccccgatgatcaaaaattcggcaggctgatagagcgcaccgaggtgccccccgacaatcatatagccgccaaacacggttcccagaaccacgagataacccaaaataactagcacacgtattccttaaattcacaatgtggatggaaggtgagtcaacgcggatgaaattcggctacagcacgggccgcaccaaagggctcggaataccgagcccttgagtttcaccagtctgtgttgttgcttagcctgcaaacaggctcagaccacgcgtttaacctgctcgtccagcagttgtggaataatatcggccagttgcggagaaagtttacgtctttttactgcgcgggatgggggttggcataaactgcagacaaaactgttaagcggctggtgcgcatgggtgataaacgtcccaccacagcaactgcaagcggaaagctgtaacataccgctgtcgacaaaacgcaccagcgtccaggcccgggtcagcgccagcaacgggggttcgcctggctgctgcggacactgttccaaatacagtcgataggctttgaccacggcttcaaccccgtggcactgaccgcatttgagcaggaactgataagcattgaaaaacatcgacgagtggatgttttgctcccaggtcatgaaccagtcggtcgagaatggcagcatgcctttgggcggcggactgccgcgtaattctttgtacagtttgatcaatcgcccacggctaagctgcgtttcgctctccaacatctgcaagcgcgcgcccagcgtgatcagttccatggcgagttgaatgtccttggcttcctgaacaatacttttctcactcatcatcaggctcttttcttcgtcacactaccgcctttacccgatagttctttgagtaaatggctcgatagcaaaatgccggtgtggatctgttgcagatcgtccacgcgggattctttcgtcagacgctcgatagtattgtggtcgtcgaaacggaagtggcaaaccagttgattagtttctgccagttttaccatttgtggcaacgtgagctgcgacagcgcatccgccatcgagttatcaatacccagacgaaacattgccgacgctttttcatcgttaatcagacgctgtgccagaagcaaatatgacaagttaatgtcataaatatgtttaagtagttcagacgtacccatattcccatcccgacagactatgtttaaaaacatacgctgggtgataaattatcgcccatgacttgggttcattcccaaagttggcaaacaaatccctgtacgccagccgcgataactgcgcgactatacacatttcgggttgttactcagtatttgatatacatgtaattacatgtatggatatacagcatcctgcttcaaaagtgtgtttttcgtaagactatttttacaaaaataataagattaatcttaataacagcgcaactctacccctgatcacttagcccacacaacgtaagtgacacgcaattttaaaaacaatgtgacacacatcacaaaaataaaaaatatccagcttaaaaaggccaaaatgtgaccatttattgacctccaagctgtgcaataaacacactaaagtaagaaaaggtcttaaaaaccagcttttatagcctaaaaacacccatttttagatcaattcgaacaaaagcttaactaaagccaaatcgcagagaaaaaatctgccaccccgccaccatggcagattaaaattctgtttatcatttaaaaccagttccttatgaataaaattacccactatcctcccctcgactgaaaagtcagatttaacttgggtggctgtttcaattttcgacagagcagatcctgtggttaaaaggcgcagtattatgggcttaacaagttaatagaagtaacaatgtgtttcgtagtgaggggggcgggaagaacgtcgttaggggcgagtcaaaaaattaatgtcaactcgccttggtcagtaaggaaagcagcaaattaatttttacttagcactttaattattatttatggcatccgaactattatatggaaaattcctaatcccagtgacgtcgttcaaaaagtgcattaggtcatccacgctttattttttggctattttttcagcgctggagagattatgcttgagccggacatctcttcagcaaaatttttgaatgtttaccatgcaaatacatcgagtatccactttacggcgttgccgccaaaaccactcccgttatcatttgctttgccatcgccaaagaagcgcagagctatgccggcaaactttcccccagagccaataaggtaagattccccctaattgatagtttatctgtcgagatatattgcccagacgctcggcacatattatcattcggtagtgcctcccccctggcaagggtattttggctacgcgagttccatttactcacttttcttttattttgcctggcgacatctcttcatcttatcgcgatttctgcgaacatgtgagattctctttccgctttaatactattaataggctatgctttaactatgacaagtaccatcgattatctgatgacgtttcgcaaatgttccagcctggacagcctggaaaaagtctacgacaagctgaattactcactgacggatgacaatgaaatgagcaacatgtaccgtgctgcggatcatcgccgtgcggaactggtctctggcaaactgttcgacttgggtaaagtgccaaagtcactctgggcgcaggtgctttaatcccccagatcgttatgcgcgcatctttttatcttttatggcggaatctcttccttgccctgagatttagcgttgcgcgtgatacaaaccacatttattgcacaggcattgctctacccttttagcacacacactcaggcaacgggagtagaacatgggatatcgcaacgtgctggttacggtggcggtcgcagcggacagccagaggctggtagagaaagccgtctccatcgtgcgcccctgtgatggaaaaatcacgctagtcagtatcattgccaatacagagattttccccgcccccatgctgggcgacctgcgtgcgttgatggaggaagagacgctgctgtttatggaagagctgtgcctacgggcaaactatcccaatatcgcaacgcggatcattcacggcgagttgggtgactgcctgacctacgccaaccagaagcaaccctttgatctggtcatctgcggtaaccatagcgatagcatgatgaataaggtagcctgctctgccgcacgctttatcaatagcagcagcattgacgtgctgatcgttccgctataacacacactcatgacttccagtttcctattcaaggcacaactcttttttcttgatgcaaattaagaagctcgttagaaatacctgaacgccaacgaagtatcgtttatgctacagcctaaccttaatactatcgccaacgtccctatatgacatcggaattttcgcaagaccatcaatatacccaacattaaatatcactgccagttatggtttatcattatatttttggcgttatttttcttcacgatataagaaagctcaacgaacactcagtcaccgcaaatattacgcaatatttttcaacaaggctcccaccatacttattacgttttcgcgtacatgcgcacacaacgctattttccactacggcagattaactagactaacctgtacctgaaccccattagttcaacaccgtcgccaaggagtcatcgatgtctcagcaaacgcatcatcgtcgttttgttttagcttcacgcccgcacggggaaccgcaggcagacaatttccgtctggaaaccagccccatcccacagcccgctgccgggcaactgttgctgcgcacggtttacctttcattagacccctatatgcgtggccgtatgagcgatgcaccctcttatgctcccccggtacagataggtgaagtgatggtcggcggcaccgtatcccgcgtgcaggcttcacaacatccagactttaacgttggagattgggtgctaggctacgacgggtggcaaagccatgcgttgtcagacggcagcggcctgcgcaatctgggcgccaagctggatcacccttccaggctccttggcgtgttaggtatgccaggttttaccgcctatatggggttgctggatatcggtcagccacaggcaggcgaaaccttggtggtcgcggcagccagcggagccgtaggttccgtggtaggtcaaattgccaagttgaaaggatgccgcgtagtgggcgtggcaggcggcgcagagaaatgccgctatgtggtggaagaactgggatttgatgcctgtatcgatcaccactcggccgactttgcagctcagttggcggcagcctgcccccagggcattgatatttactatgaaaacgtcggcggcgcggtattcgatgcggttattcctttactcaataccaaggcacgtatccccgtctgtggcatgatcgcccactacagcgcgaccgagttaccaccaggcccagatcgcttgccgttgttacaaagcctgatcctgcgcaaacgcatcaagatgcagggttttatcatcttcgatgattacgcagaaaacttcggcgagtttctacaacagatgggggaatgggtcagccagggcaagatcaaattccgcgaggacgttgtcgacgggttagaaaatgcccctcaggcctttttcgggctgctgaaagggaaaaacttcggcaagctgattatccgcgtcgccgaggagtgatcctctaatcagggcgctgtgcgccctgaaccctttacgcagccttcagaatttggttaccgactggcaaatctccagatcaaagtagccatcagccacgcaatcattgagataatgttcatagcaaacaccctcagacggccgatagccactggcgggtaatagctgctggtaaaaattacgccagggggtagcgaaatccccatcggtgatccgcacccggtaaacggcgtactcccctgccggcagggtttgtatcaccattttttcactgccggcaggtagcacaaaatcatcggcaacggtaaacaccacgtcggcacgcaggttttccgctgcgacctggttcggatcgtcccaatagagtaccagccatttccccacgggaatgccttgccgttgttgccaggccatcagttgctgaaaacccagtgggactgattgcgcataaggccccacaacccgcacgccaacggccttttctgccggtttttgctcaatgcttaccgccattgtcatcactcctctcgcttatgtccggaacggtagagtcaagcgccaatttcggttcgtacatccagcaactcagggaaaaatgtcagttctaacgccttcttcaagaagctgacgccgctggagccgccggtacccgatttaaaaccaatgatccgctcgaccgttttcatatggcgaaaacgccatagatggaagctttcctcgatatccaccagcttctcggccatttcgtaggccgcccagtaggtttgcggattatcgtaaatcagtttgaacaccggtaacagctctggattgcgctggtaaggctgggtccagtctcgttcgatacatgcctgaggcaccgcaagaccatggcgggaaagatagcggaggaattcgtcatacaggctcggggcttcgaggatcgctttcagcgcggcatgttttggcgcatcgtcgctgaagacggccagcatggcggcatttttgttacccaacaaaaactcgatcgaacgatattgatgagattggaaacccgaagagttacccagcacgccacggaactccacatattccgacggagtcagcgtttccagcaccgcccattgctcaaacagcagacgctggatctgctttaccctggccaggatcttgaaacagtggctgagcttatcctgctgcaccagagtcctggccgcctgcagctcatgcagcatcagtttcatccacagttccgaggtctgatgttgcaccacaaacagcatctcatcatgatgctgcgggctggaaagtggctgctgacaatccaacagtcgatccaggcacaggtaatcaccatagctcatgcgcttggaaaaatcggtgacaatggcgctttctagttcccgctgattcatgttctctctccgtgtcgctcacgcctttggcaaacgtgacgcgcgttgctggttcgcaagtgaagagaaaacaatagtctatcccagcaacattaacgtaacaattaacgagagctgcctcgcagatccggtgctgacatcggatttaacgggcgcagcagcgcccctacaccggacacttaaaacacatcaagcagccatttttgtgccggagtcaaccggctggccgtttcttccttcagccagcggcgctgatcctgctgggcggtatctgcacggtcaatatagagtgcgtgcaacacccgccgccgagtaccgatcctgttctgagtacctccatgccaggtgtgcgcgttgtagatcatcacgctaccggcaggggcggcaaaaacaatttcatcaggatgtgccaagtcgggatcggccaacacatcttccggcagttccggccgcaggtgcgttccggcgataatccgcggcgcgccattttccgcacttaggtcgtcaatcgcccatatcgcattgaccaaatggacttttggaaagtcgggacgcggctttttccagtcggcatgcagaggctgatggccgccaccgtgcaaggcttcgcgggcattgaggctagagactttgaactcaccgttgaaaatatagcggcaggcagacaggatcagcgggtgcgaccacaccttttcccataccacacctttattcaccatgttggctatgcgcgttgctgtcgcttcctgatggtgctcaatggccaggttatccccttctttctccaccagctcgtcaataagattgcgcattgccaccagccagtcaggatcggccacgttgtgcaccacggtatatcccaacgtatcaagctcctgcttcatctgtgccgttaactcgatactggctcctaaagcctccaggtatatctcagattgacgttgcatcatgatttctccatttactttttgataacataacggcaaatttactggaagcctgggccaaaaacagggggcttttactacgaaatactggacacagatgtacgccagccaaaaatgtgaccagggtcataaatgcgtaaaagacccatgaatgccgggagatatcaccttaattgcgctgcccgcttgggtttaccatcattctcaaatgcatcgttaaccgccgaagcgcactggagatcgcgatgtctgaaacgcttgttaccctgcttaaacagctgattgcccaccaggatgcgatccaggtaaggttccctgaccccacttttcccgccccgccactggccttctgcgtgccttttccacggcttgagatagtgctcgaaggggaagttgaagatcagtgcctgcctttggcaaataacacgctctccagctatcaggtgctttatgtccctgcgggcaaatggagttttccgcaatggacccagccagccaccacgctgagcatcttgttcagtaagcaaaagctgggtttcagcctgcaaagatgggacgggaaaacgctgtgtgaaacgcaaaaacagcacgtggcgcggcgtgggcccagagtcggctcatacctgctgctggcgatgaatgaggttttgctgcaaccggatgcattgacctcgcagctgatctttaccgggttggtcagccactgcctggaacagctcgcaggccaggggcaaaccgtcagtaaaagccaggaactgctgctggccatacaggattaccttgatgaccacgccgggttgccgttaacacgggaaggcgttgccaaacgatttcatattacccctaactatctgtcccacctgtttcaaaagtcaggcccagtcggtttcaatgagtacatcaccggggtgcgcctcgagcgggcgaaaaatctattgcgtggctatgatctgaagatcaaagagatcgctcataactgtgggttcgacgacagtaactatttttgccggatattcaaaaagcataccgatcgttccccctctgaatatcgcaggcattgccgcagcctgtagtcgcacacacgtgtgcgcctcagcttgatggcaaagtagcaatcttgccgaatttgtaaggtggccgcacatgttcggtcgagggtgcgctgcaagatgctgcgcaccctcgaaacaggccgattgaggtttatcaccgggcataacgcccggtgataacgtagattagaaccacttgccaaagcggcggatgtagaaacgcttcatcaattgcgccaccacacagtagctgaccagagtggccaccagccaagggaaatactcccacggcagcggttgcaacccgacccatgccccgagcggcgagaacggaatatagataccgagtgccataataatcccggtggtcaacaacaccggcagcgccgccgtgctctgaatgaacgggattttctgggtacgtagcatatgcactaccagcgtctgagacagcaagccttcgataaaccagccggactggaacagcgcctgatgctctacgctattggcggcaaacacgaaccacatcaacgcataggtcgtgatgtcgaaaatcgaagacgtcggcccaatccacagcataaagcgaccaatattcttggcatcccacttgcgcggtttacgcaggaattctttgtccatcttgtcccacggcagggaaagctgggagatatcgtacatcaggttctgtaacagcaggtggatcgccagcatcggcaggaacggaataaacgcactggccaccagcaccgagaacacgttgccgaagttggagctggcggtcatgttcagatacttgatgatattgccgaaggtttcacgccctttgatcaccccttcttccagcaccatcaggttcttttccaacaggatgatatctgcggattccttggcaatatcggtaccggtatcgactgaaatgcccacgtcggcatcacgtaacgccggggcgtcgttaatgccatcccccaggaagcccacggtgtggccattagcctgcaacattttcagcacgcgtgatttttgcaacggcgtcagcttggtaaataccgtacgttgctcaacttcacgcatcagatgggcatcgtccatctgttcaatctccaggccggagagcggctctcctggctccaggccgacatcgcggcagattttacaggtgatcaccgggttgtcgccggtcaacactttcaccgccacgccattttcctgtagggcagcaatcgcttcacgagcgctctcttttggcggatcgaggaaggtcagcaggccttcgatcaccagatcgcgttcatccacaatgctcagtggcaaagtacaaccttccagacccagatctcgcgttgccagcaccagcacgcggaaaccatcttcattgtactggcaggccaacgcctgcaaatcggcacggcgagcctcgtcaagcgccaacacctgctgcccaacgcggacgtgggtggcgatctccaacatctcttcaactgcacctttgcaaatcagcagttggcgctgttgttcatcctgtaccacgatcgacaagcgacgacgtataaaatcaaacggcagttcatcaaccttgctgtagcgccccaatgcctcaacgcctggctggccctggccaaaacggatcaccgcctgatccatcaggttcttcatgccactctgatggaagctgttcaaccaggctaaatgcagcacgtggttatctttgctgccattcacgtccagatggtgttccagaatgatgcgatcctgcgtcagagtgccggttttatcggtacagagcacgtccatcgcgccaaagttctggatcgcattcaaccgtttgaccaccaccttgcggcgcgccatggcaattgcgcctttcgccaggttcgagctgacgatcatcggtagcatttccggcgtcagccccacggcgaccgccaaggcaaacagtgccgcctccgtccagtctcccttggtaaaaccgttaatcagcaagacgatcggcaccatcaccaacataaagcggatcagcagccagctaacgctgtttactccacggtcaaaggcagtttgcgaacgggtaccaacgatcgacttcgccaaagagccaaagtaggtgcggccaccggtcgcgactaccaccgccgtcgccgttccgctggccacgttggtgcccatcaggcagatattggctaactccagcagttcgctttcgctggaggcatcaatctcgctggacttttggctcacgccggccaaagcatcgtatttttcgatcggaatagcttcgccggtcaagatggcctggctgataaacaggtcgcgtgagctgagcaagcggaggtctgcgggtatcatgtccccggcggagagctgaataatatcgcccggaaccaactcacgaatgggaatttccaccgctaacgcctgggtgctgaaattactgcggcgcaacaccgttgccgtggtacgcaccatcgatttgagtgattcggccgctttattggtgcggtattcctgccagaagcgcagcaacccgctcaacgtaaccataatcaggataatgatgacgccggtaagatcggtttcctcaccgttttgcatgggcaaccagtaatcggtaaagaaactgatccctgccagcaccatcaacacaaagataaacgggttgttaaacgcgctgactaactgtaccagcgcatgcggtgccttctcatgggcaacctgattactaccgaaatactgcaaacgctcctgggcatcttcctgagttaatccgatgcggttacagtttaaattagccaacgtttgatcgaggctgttctttgcctcgagagcaatggcatacggctcgcgctgtttatcacggcgacggctattttctttaatatgggtcatgacgctattctctttttttactttgcacacagggttaccccgcccgtaataacgggtgaacatgcacaaagtggaatttatttggtttacttcattaacgtaatgcttattccattaatatacctttgaatttcaagttgtagctaggtgacaagcttactcatccccaggagcttacttttgggtaagtgactggggtgagtaactgcaggaaacaacactacagcttgaaagacgacgggtatacgcagaataataaaatctctggggggtgcttgcataacacatccttatcaccttatcggtgaaggttatttatggttaaacgggtaattctgacgcaacacgccaatgcacggcactcacgctgcgttctaaactaatacggcagacaatgccctcaatctctttttgcgcggccgggttagccacaatttccgcacagacttccaactggccaggaatggcaatatcggcgctacgaagcgattgcaggcgtaatgccacgccgttcaacgcctgtaggatcagggtacgaaccaggatttcatcctgctcaccgcaggtcacctggacacgataacgcagctccagatccaccgcttgctgctggggttgcaggttaatgcgctgcgccgcttcacgcagcaggatattggcacacaggatcaccagggtggcgcagacggcctcccaatgctgccccaggccacatagcacaccgatggccgcagagcaccacaaggtggctgccgtattcaggccgcggatattcagcccttctcgcataatcacaccggcaccgagaaaaccgataccagaaacgatctgcgccgcaatacgccctgcgctggaaggctcggtgtcaaaagagctcaggataaaaacggcggcgccggtcgcgaccaaagaattggtacgcaagcccgccatacgctgacgccattgacgctcggcaccaataacggcacccaggcccattgccaggaataaattcagaataaaaggagtcatagccatgatcttccccttaattaatcattgaggttgaatcatgtgccgttaagcacacgcgaaatcgcgccgataattaatcagcgggtctgcgtttgggtgcccggagggaaaaggccgtggtgatggttaaataccataatcatatccgaatcaatacgcccaatgcgcaagcgcctcgggaaaactttcatgttcgggtttgcacagctcggaataacgagagaggggtgctgcccgccgtgttcggcaagcaacaaatcacaggagattggtcaacttgcctttattatttcgctactactgcaactgtccaattggttatctcctcggtaattttggctggagtatagtgacatgaggttgtgaagtaaaggttatattagtaaacgaaagctaaacagaatattccccttatagagatattgttataggtacaataataatcgggcgcagcagcctctacgtagtgagcaacgttgtttaatttgtagggcgccccaagacgcggcacaagggatccggttgagcgatttagtttagctgttgctgtaaccagttcagtaacgctaccacctcaggcgttaaaccggcggcttgtggccacaccagatagacatcgctatcattcaaatgcagcgcggccgccagcggcaccaagcgccctgctgcaatcgcatccttcgccagcacggccttcaccagcgcaataccaaacccctgctcggctgcacgcaacagtaaacccgcgtcgttgaacagcgccaactgctgcccaccgccaattctccctacggcgctaaaccagctatgccagggagtggcgtcatgctcaagcagcgggacctgtggatctccagcatcaaatgcctcctgccattgcctggccagtgcgggagtcgctaccggcagcactactcctgaggcgatacgctgagcctgaacgcctggccattgaccatcaccaatacggatcgcggcatcaaatcctttacggtctagatcctgtatcgccagcgaggcgtcaatatccaaccggatcccagggcaagcacgatgaaactccgccaatctgggcaacaaccagtaatgcgcaaaggaaggcagcacgctgatgcgcaacatctggcttaccgctacccgtctggctcggtcaacgccctgttgcaaagcgagcaaggcaggttcagttgccgccagcagttcgcgccccgcagcatttagccgaaccccacgcccggagcgttcaaagagtggatagccaatagcctgttcgagcagttggatttgttggctaacggcaccatgagtcaggctgacgcgttgtgccgtggcacgcaaattctccagccgggcagcaatcacaaaggttggcaaaatatgcaggggaagacgctcattcattgctggttagccttgctatccaaaagggtcattttttatcgatattagcactaatcaggttcgcctatagtgcaaacctactgacccctaactcaaggcatgaccatgcatccacgtttgcagcaggatctcgacgatttaccccgcatacttgaccataccaaccaattggcgcagggcttccttgccagcttgagccagcggccggtatgcccgcccctggccgaacaacagttgcaaaccggtgacgatcggctagccgaagagggttgcggtgcgttagcggcgttagacgatttttggcaacgctatgaggctggcctttccggcagtgccgggccgcgttactttggttttgtcaccggcggtagcactcctgcggcgctggctgccgactggttggttagcactgccgaccagaatagccaactgagcaatgataccgtggcggctgcgatcgagctggcgacaattgagcaactgaaaaccctgctgcaactgcccgccgacttcagcggtagctttgtcagcggtgccaccatggccaacttcaccgggatcgccatcggccgccagtggttagggcaacagcgcgggatcgatgtggcacagtttggcttggccgccttggggccgattcaggtcctttccgccaatgcccatgccagcagcgtgaaagcgctcagcatgctcggtattgggcgtgaagcgttaaagtctatcgccagccaggctgattgcgaagccattgatatcgaggcactggagcgtcaccttgccgccacgccagatatcccgacgatagtgctcgccagcgcaggtacggtaaacaccggcgttttcgacgatctgccccgcctgctggcactgcgtgcacgctatcccttctggctacatgttgatgccgcctttggggggatcgcggcctgttctccccgcttggctcatctgctggacggttggcatcaggcggactcaatcaccgtagatgcccataaatggctgaatgtcccttatgacagcgccattcaatttacccgtcatctggcattgcagatgcaggtgttccagaatcactcgacctatctggaggcccccacgttgcgcccagataactatttgcacctgacgcccgagaattcacggcgttttcgcgccctgcccttatggatggcattgaaagcctacggcagcagtggtacgcgggagatcgtcgagcgtaacgtaacgttggcgcgacgtttaggtgacggattggcggccagtgaaggcttccgcctgctggccccggtgaatctgaacatcgtatgctttgcgctgaagggtgttacaggcgatgccaccgccgcacgcaaccgcttcatcgatcgcttggatcggcacggcgtggtgcgctgcacgcccaccagctatgcgggccaaccgggtatccgggctgccctggtgaattggatgaccgaagagcaggatattactttggcactggcatcgatgcaggcttgtcgggtcgaagcctgaaagtcgcgaggcgctgcttctgttggccgtcggctgagatattctgaggcgatagccaggcagcaaacgcctcgcgcaatactggccattcaccatcgatgatggataaccagtccgtgtcgcggttgcgcccctttctggtcatcgcctgacgaaaagtcccctcaaaggtgaagcccagacgcagtgcagcctcgcgagagggggcattcagacggtcgcatttccactcgcaacggcggaatcccaaatcgtcaaaagcgtgcttgagcatcagaaagatggcttcactccccatagctcgccgcttcatcaagggtgaccagttgatcatccccaactcaaccaccccgttgggttggtcgatgttcaagaaagcgcaggagccgaccgctttaccgctagtagcatcgatcaccgtcagggtgtttctcccctgggttgccagctgtcgctgcaaatactgctggaaaacaggcaactccgtggggcgttcactagacagataggtccagtcgcgcccgtcctccgccagttggtaggcatgaaacaactcatcggcacggcgcgcgatatccatcggctgcagacagcagaaacgcccttgaagactctgttttcccggttcacccgctggttgccagccctcaagcactgcaccaatgggttgcccaaactgattgtgatccacctggcctccgggttgtgagttgaaatcgcctttagcaacattacgttgtctctgcgctctaagatacgtcaggaaaatcgatatgtcgttgataagttatccactcgaaaatcattaacaaatgaaataatttacattagttatttaataaacgactcatggttagcagaactactcattttgactttatttcactcataaactaattcctaaaacgcataaaaccaactaagaatcgttaccatttgcgccaatacattgatacaatcaattgaataagcaaaattaatggcgtttggtgatgaaatggaagcaacaaaatcagtcaaaaaaccgccaacgccggcttcacagcaagccataagatacccttaagaatcatctgatgatcgaaaaatagtaccgagacgaaaatagctgaccttagcaacaaatttaaggctgactacctggcgtctactgatatttccagccgcaaagtagccacagagcataataagtcgacttaagctaaactaatggttttggaagatttgaaaatataatttgaaaagacgttgagtcatgccggttttattgatagaaagttgcattcataagatgtgatttttttataacttttagccttttatcttcaggctttctttttataaccgcgtggaaacggacttaagcaggggggctttatgccaataatcattatggattcatgcagttacactagactaggattaaccgactacctgacgtcgcacgggttgaaaaagcgccagattagcgccgtcaatcatatcgacggcctgcatgagaaatgcaccaaacttaagcctaatatggtattcctgaatgaagactgcttcatccatgaggcggatgcgacggaaagaataaaacgcgtgatctctcttaatcccgatactttattctttattttcatggccatcaccaacgtacatttcgacgattatttatacgtccgcaagaacgttatcatctcgtcaaaatcgattaaaccgcaaaccatgagccagctgcttaaccactacctcgaaagaaaactggttcgcccggaaaaaagctcgctggatcagacgcctgtcacactaagccaaaccgagtcaaacatgctgcgcatgtggatgtccggccaaggcaccatccagatctccgatcaaatgcagatcaaggtgaaaaccgtctcttcccataagggaaacatcaaaagaaagatcaaaacccacaacaagcagatcatctaccatgttgtccgcctgaccgacacgcttaccagcggcattttcgtcaacagccgttgatgaccattgcggccaaataaagcgacagcagaacacgttggcttagggtacgacagaaaaacgcccgttttcagcggcaatgatgccgctacgggtattttggcaagttttcaacaccgcgtaactgtgcggccaggtttcagcccaccagccagaccggcggcaagctgttaattgcaggaaaagatttaatcctgttcagcactacgcagctctacaaaggtaccatcgcggctatcgatctcattgaagaaccacacgcccgccgggtaatcttccagtgacaccagatacatggtgccttcattaaacacttcaacttccagcacgaccccttcccgacgagggccgccgtcggtctttaccgtcaccagatcgttaactttcatgctctacctcgttatttatcccggatatcagtctattacagttgacgaaaagaacccaccattgcgtaatccgttgcccctctgagccaccttacgacgatggctagtaaagcttagcagaatgtcaggctgacctttcagagcgcctggcacaccaccgtgaacggtttttccgctcactggctcaaatcacagacacaaaaaaacccgccttggcgggtttttgttaatcagcgagaggccgattagatagcggtaacgttagccgctgacggacctttagcaccgttctcgatagagaactgtacgttctggccttcagccagggtcttgaagccttgatcctgaattgcagagaagtgtacgaacacgtctttgctgccgtctgcaggagtgatgaaaccaaaacctttagactcgttgaaccacttcacttgacctttaatcatgttagacatgttgaattccttcaataaaaaatttaagccaccatgggcatgaaatagccggtcatcagttacttatggaggcactagaaaggaaattcgtcagtgaagagctatcaaggataacgctttaaatttgaactactttactcaaaatgtcgtgcataaataggtctgtaccacaggccgagaatcattaactcatgtcgggcgtataatagcaactctttttatctcgtgaggctggaaagggagatcgaacgcacagaatttgctccccgctggcgaaattatcggcgttatcttgcggatttcactgacaatggtggtaacgtagcgccacaatatttacaaaacttcgcctcggcttcatgcccgccacggtcgcattgtgcgcaatggcgctgttcccgatagcgctgcatctcctgcgacatgtaggcggtcaggatccccgtaggcaccgcaataatcgaataccctaccaggatcagcaccgaagccagcatccgccctaatggcgtgtggggcacaatatcgccgtagcccacggtggttaacgtaactaccgcccagtacattgatgcgccaaggctggtaaatccaccactgcctccctccaccgcgtacatcaagccaccaaatacgcacagcatcacgccgacaaagccaaagaacagggtcagcttatggcgcgccagcttgatgctgcgccagacaatgctcatctcactcatgtagcgcaacagtttcaacacccgcaatacgcgcaggatccgcagtacacgcagcagagcgatatattccaccgccatatgcgggaatatccagatgatatacatcggcaacatcgtcagcagatcgacaatgccaaaaaagctgatggcatagcgctctttactcggcgtgcaccacagccgcaacagatattccacagtaaaaagggtggtgaaaaagacctccgccaaaaacagctgataaagcacttgagcattgggggtatacagcgagctgccgccgggttcgataaacagcaacagcacactgagcagcgccgtactcacccagaatagctgcagcctgcgccccgttcgggtttgattgctgaacaacagctgatagctacgctggcgcaggggttgttttcgtactttattgatcataatccgatgtctggtcaaaaggtttacacgcatactaaatccgaacctgcacaccaccaaatttaccccatgacaggatcaggagaaaatgagcgccaagccgcaaaatggtccagcgtcatatttccatcacaaaaatgtcacaatccagccatatgatggctagcgattatccgctccgggttaacaccaaggatttcgcctatgaacaccgtaaaagccattaatcaccagcaggcagaaacgctgatccgctcaggatcggcgaaaaagattgagctggcctatgacattgacagcgacgattttttccagctcgccagcctgtggtgcgatcagggtgccaagatttctaaaggtaaaaaacactttatcgtctcgctgaaaggttttcgtattccgccaaacgactgatcctctgccccctctgcggcggtatctctgcttgtctagataaaaccgccctttcgcacacatgccaactctgttatccctataagataatccagccgggaatatcccgaatacgcagattgatcaaggagaacggcatgtcagccaacgcacaactacctgaaaacatgaaggtcatcgaaattagccagccgggcgaaccagaggttctggtgagtgcggagcgcccgttaccggtattagcccagggtgaaatactggtgaaagtcgctgccgccggcgtcaaccgcccagatgttatgcaacgccgtgggcaatatgccccaccgccgggcgcctcggacattccagggttggaaattgctggcacggtggtggccgttggcgttggtgtacaacgctatgcccccggtgacgacgtatgtgcgctgatcgccggtgggggctatgccgaatattgcaaggtgcatgaaagcaatgcgctgccggtccctcaaggcttcagcatgatagaagccgccgccatgccagaaacgttcttcaccgtttgggtcaacgtatttcaacggggccatcttcgggccggggaaaccgtgctgatccacggaggcacatctggcattggcacggttgccaccctgttggccaaagccttctgcgcctatgtcattactaccgttggctctgaagaaaagcgtgaggccagcctggcgttgggggctgacgtcgccatcaactaccgcaccgaagattttgtcgagctgacaaaaaccgccaccaatgggaaaggggccgatgtcatcgtcgatctgatcgcgggggattacgtggagaagaactaccgcgccgccgcaatggatgggcgtatcgttcagatcggcacgcaaaacggcgtagtgaaagaattgaacctgatgccattgctgcttaaacgcctgacccataccggctcaacgctgcgggcgcgcagtgtggaagataaagcccagatcgctgccgaactggagctgaaagtgtggccgttgctggaacgcggggagttaaagccacagattttccagacgttcccattggaacaagccgcgcaggcccatgccttgatggagtccagtgcgcatatcggtaaaattatgctgacgctgtaatggaaaccctccggccagaaaccggagggctaggctgggtccctcacttgaccctggggccttgcaacgcgtccaaatgacctctagcggcactcacgtgcaattaagggacacagcctcatatcagccgaacagtttgcctttcagcaaatccatgccggcgctcatcaaatcgccgccctgtggctcctgaccattaggtgacagtttgtcggtgatcatcggcaaatactgggcaatcagggcagaagcctgcgccggatcgatccccaacttaccggccaactgtgcaatggcatcggtgctcaacgcctgctcaacgtgttcgccgctgattggctgattttcacccgtgccgatccaggaggcgaccacgtccgccaaatttccctgacggaatttatccagaatggccggcaagcccccctgctgctcaacccactgcaagatggcgctgtaatccatacctttaccaccgctcaatgccccaactaacccatccaataatcccatcgctatcccccttctcaaacgctgtacgtttgtcgtatttaaaagaaaagggccgccttagcgacccctgttgatcgaacccggcttagcttctgatctttctgtagacaaaaagcaccaccagagcaccgacaacggcaaccacaaagctgcccaggttaaagccatcaacccggcccataccgaagaaggtactgatatagccgccgacaaccgcacccaccacacccaggatcacggtcatgataaaaccgccgccgtctttacccggcatgatccacttggccagaataccggcgattaacccaaaaacgatccaggaaataatacccatttttactctccctcattgacccgttgcccgaaattgctggcaataccgttatcaaaacgttctccgtcagcgaccacccactgacagaattaacgcctctgtaccttattactatagtcaaaaatcagcgggttacctacatcttgtagtctgaaaaactgcgcataaaaattgtgcgattttcatccaactgtcatgttgcgtggcgataatcagctatactgaagaatgctcaactgaacttcgaccgaggatagcgtcatgagcaaccctcctttcatgctgtttttggttttggtctatgccctggccgccgtgtgggatggttccgccgcgttgttgtttatgtgaacgtgtccgaccagactagccattcctgatcaaggcgctgtttttctattttggcgctcctcggcccagcagttaagcgggcgcagcatgcgactcccctaagttcggacatgctcaccccctacaaattcagcaaccttgtcgggcatgggattgaagaggaggaactatgttgattcaaccctatctgttttttaccggtaactgtgagcaagcggtgaatttttatgcccagcagctaaacggcaatatagaaatcatgatgcgttacaaagatatcccggcagaggagcagcaaaatgggccgcccaatgccgatcctgactcgattatgcatgccaggctggtgatcggagataacgtgattatggcatcggatgggtgtccggccgaccctactggcccggcacatagcggttattcactgtcgatccgcagtgagaacgtcgagcaaggccgcgaggtatttaaccggctagcccaaggtggcagcatcaccatgcctttccaaccgaccttctgggccaagggctttggcatgctgaccgataagttcggtgtcaactggatggtcaacgtcgagtagccacatgatgcagtgccttgctgtgagggtaggcactgcccagtgctaacgatgccagcttgaagccaccagagagaacaagacaaacaacaccagcaacaaaaccagagccaaccgccagaacggtgttttacgccgctgataggcgataatcatcaacccggccaacgccaggagcgttaacgggtaatataccgccagcatcagtaaaacctgcatcatagcgtcagatagtgctgccatgcgcctccccggtaccaatttatgctgaacatatcctggaaatataacgggacatgcaagatggaaatagaagggttaagattgttcgcaatacccatcccccattgattccatgacaggaatgctatgccagcaccccagctcccgccccaaaaacagccattatccgggaaaaacaaaaactcgccgttactctatcaggctggcgtgttcgttattatcgtcgtgcttaccctgatcatgttcaacgcctagcaaatctggaacgctcatcaacgcaacctgcaaattgccgaaaatgactcgcagaatctggcccgatcgctggcacagcacgccgaagatacctttgcgcaggtagacagtaacctggccgatcttagcgaacggattgaaaccgatggcttgggccaaccccagcgtttacgcctgcaaaaaatcatgcagactcaggccagtaactttccgcaactgcatggcagttttatctatgatgcccagggcaactggatcctgacgtccaacggtaaacccctcagccatgccaataatgccgaccgggcgtattttaaataccacgtcactcataacaataatatgatttatataggcgaggtgatccgcagccgctcgaccggcgatttggttatcccggtgtcgcgccgcctgaaccatgcggacggcagctttgccggcgtggtcatttcgacgctgtatgtcgattatttccgccagttttacaacacctttgcccttaacaacgacgcctcactcagcctgatactggccgacggctccattttatatcgccgcccttacaatgaggatgccatcgggaaaaacatctcccatagcattttattccgcgaagttctgccgcattcaccttttggcaacgtcaccatggtctcacagtttgacaatgtagaaagggtttatggttattcgcaggtggagcgttatccgctggtgatcaccgccgggctgtcgaaaaaagacgttctggccgactggcgcaacgatgcgtcactttttgcactcggtggaggagtcctgctgtccatactgctggccctggggttggtactgatacgtcagattaatcaaagcgtacagaccgaagtcgagctggtgcgcacccgtgatcaactgacgctgatgaaccacacgctggaagaactggccttgctggatggcttgaccggcctggccaaccgccgtcaatttgatatcgcgctaaaaaacgaaatgactcgggcggcgcgcaacgatcgcagcgtagccctgttgatgctggatattgattattttaaacagtttaacgatatctacggccacgtggctggggatcagtgtttgcaacagttgggccgcatgctgcaaagcatggtcaaccgccctggcgatctgatggcacgttacggcggtgaagaactggcaattattctgccggataccgatcttcaaggcgcaatcgcctttgccgaacgggttctagagggcatccggcagttgaagatcgcccacgcaggcagtccgctggggattatcaccgccagcatcggtgccagtgctaaaatcccgcatccgtataacgatacgccgctgagcctggtcagcctggcggataacgccctgtatacggcgaaaaaaggcggcaagaaccgggtttgcagcctctaggctcagaatagttagggtagatcatttcagcaaataatgggggcatcttaacatgatgcccctgacgatccagccttagtgcaccgtgttgaagtccccttcctggcgcgccaccagcgtcagaatgctatacagcgccacggcctgctgatgctgattgagcacctgcacatcccagaccaccacgccatgcggacgatcctcagcggttttttgcggcttgcggattttctttttacaggtcaaccgcacctgaatggtatcgccaattttcaccggttcgataaaacgcaggttttccatgccgtagttggcaatcaccggcccgacgcccggatcgacgaacagcccggcggcggcagaaaccacaaagtaaccgtgggccactcgctcaccaaacagtgattctgccgcgccgatcttgtccatatgcgcgtagaaatggtcgccgctcaggcaggcaaagttgacgaggtcggcttcggtaatggtacggcgggcggtcagcaagctttcgccaatctgcaactgctcaaagtatttgcggaacgggtgtacctgttcctccaccacgtcggcaccccggacccattcacggctgatggccgccagcatcgacgggctgccctggatcgccgtgcgctgcatatagtgttttaccgcccgtaacccaccaagctcttccccgccgccagctcgccctggcccaccatgcaccagcaaaggcaacggtgagccgtggccggtcgattccgtagccgcgtggcgatccagcaccaacatgcggccatgggcgcaggcggttgctcgaataaactgtgaagccaactccgcatcagccgtcaccaacgatccggccagactaccttgccccagcaacgccaactcaatggcctgtgcggtagtttgataaggcatcagcgtcgccaccgggccaaacgcctcggtgccatgtacggcctgatggcggaacggatcggcgcagtacagcagggtgatcggataaaaagcacctgattgagcgccatcgcccaccaccttcaacttatccagcgttgcaccacagagtggctcacagccattgcgcagcaagaattccaccttttgctgcacgtcgtcacgctgttcctgattgaccaacgctcccatccgcacctgctccagctgtgggtcaccaatctttacgccagccaggcgctgcaacagcgcttgctgtacctcggcaatgcgggctaccggaacgataatgcgccggatagcggtacatttttgccccgccttgctggtcatttcgcggctgacctctttgataaacagcgcaaactccggcatttctggcgtcacgtcctcccctagcacgcaacagtttaacgagtccgcttccatggtaaaggcgatcgatttctccagcaggcgcggatgagaacgcagcttctgcccggttggcgcggagccggtaaaggtgaccgcatcctgataatcgaggtgatcgaacatatcacccacgccgccgcagattagctgtaacgccccttcaggcaccaacccgctgtcgataatcagcttcaccatcgcctgggttagctgtgccgaagcggtggcgggtttgatgatggcaggcatccccgccaaccaagtgggtgccagtttctccaacattccccagcaagggaagttaaaggcgttgatatgcagtgcgacaccggggcgagaagtcagcacatggcgtgcggcaaactgtgactgcttggagagtgggatcagctcatcttccggccacagcgtatcgtccggcagttcgcgccctgccaatcccgcataggagaacagcgtggcaataccgccttcgatatcaacccagctgtcattacgcgtagcaccggtttgataggagatctgatatagcgcttctttattagccagcaggtgtttagccaccgctttcatcatctgagcgcgctgttgaaacgtcatctttgccagcgccgtgccacccagcttgcgggcatagctcaggctggcagccaacggcagcccgtcggagcagacctgatacaaaggctcgccggtaacggcatgctggatctcgcgggcttgaccctggccgtacacccaagcgccagaaaggtaactggttaactgctgcatttgctcctccggaattcataaatagacaccatcaagattaatgatgtatcacataatttccactttacgccaggttaaaatttaacaaaagcaaaacaaaatcattaaatcgcaaagttaacaccaccgttatcgatagacaccgaaaataaatagtcatttaaatcaacaaaataataaaacgtattgtgatgctcatcgcaaaaccacagcatttgcatttgatcttgttgttatcaacttgtagctttaaggttagttaaagtgattcacatttttggttttaatgtgaaaaacatgaatcaccaagaggcaagcatgacaactgacacacaatttcagcagcactttgacgacaagatcgccgccgatatctccatcgaagccaaagactggatgccggatgcctatcgccgcaatctgatccggcaaatcggccagcatgcgcattccgaggtggtcggcatgttgccagaagccaattggctgacccgtgccccttccctgcggcgtaaagcggtgttactggcgaaagtccaggatgaggccgggcatggcctttatctgtacagcgcggcggaaaccctcggctgcacccgccaggatatctaccaaaagatgctcgccggtcagatgaaatactcctccatcttcaactacccaacgctgaactgggctgacattggcgtgatcggctggctggtagacggtgcagccatcgtcaatcaggtagccctatgccgtgcctcttacggcccctatgccagagcgatggtgaaaatctgtaaagaagagagcttccaccagcgtcagggctatgaagccgtgatggtgatggcccagggcagcgaagcgcaaaaggccatgctacaggacgccatcaaccgcttctggtggccagcgctgatgatgtttggccccaacgatagcgattcaccccacagcgcgcagagcatggcctggaagatcaaacgccacagcaatgacgagctgcggcagaagtttatcgacaacaccgtaccgcagttggaagccctgggcatgaccgcccccgatgccgatttggcatgggatgaggccagcggacattaccgctttggcgagatcgactgggcagagctgcacgaagtgatccaggggcgtgggcagtgcaaccacgagcgtctgcaagccaagcgtaaagcctgggacgacggcagttgggtacgggatggtgccatggcacatgccagcaaacgcgcggcaaatgcagcttaatcgaggagagaaaaatgactcacgccgaatggccgttgtatgaagtgtttatccgcagcaagcagggtttggcccatcgtcacgtgggcagcctgcatgcagcagacgatcagatggcgctggaaaacgcccgcgatgcctacacccgccgcagtgagggctgttcgatctgggtggtgcaatcctgccacctgatcgcctctcaagcagaggatcgggcggcattcttcgatccttccgacgataaaatctaccgtcatcccacgttctacaccatccccgacggcatcaagaacatgtagaggcaggccatgacgatgagtaacgcagcaacaatcagctatgccctgcgcttgggcgatacaccgctcattctggcacagcgcctgtgcgcttggtgtggccatgctcctgagctggagatcgacctggcactggccaatattggcctcgatctgctgggtcaggcacgcaatttcctggcctatgccgccgagctttccggcccgcaacacagcgaagacagtctggcctttggccgcgacgaacgtgaatttcacaacctgctgttggcagaacagcccaacggcggctttaacgacacgctggtacgccagttcctgctcgatacctaccacgtactgctgcaccgggaattgagccgcagcaaagacagccaactggccgccattgccgccaaatcgctgaaggaagcggattatcacctgcgcttcagccacggctggatgatccgcctgggtgacggcagtgaaatcagccaccagaagatccaacagtcattaaacgacctgtggcgcttcaccgccgagctgttccacgccgatgagattgaactgcaactggccgagctgggcattgccgtcgatccacgccagttgcaggcaccgtggcaggccatggtgaacgacacgctgcaacaggccacgctcgcgctgcccaccgagcaggcatttcgccacggcggtaagcaagggcggcacactgaacacctcggcccgatgctggcagaaatgcagtttctgccacgcgcttacccgaactgtagctggtagaggcaaagatgaatatcacccgactgcaaccggccgagatcccgcagatctggcactgcttacagcagatcagcgatcccgaactgccggtactgtccattaccgatctgggcatggtacgtgacgtggagcgcgacggtgcaggctggcacatcacctttacccccacctattccggctgcccggcgaccgaatacctgctcaacgccattgaacagacgctgaacgaggcaggtttcagcccggtaaagatcaccatctgcctcagcccggcctggaccaccgactggatgaatgcggatgctcgccagcgtctgcgtgaatacggcgtggcgccaccgcaggggcaaacctgtgaaaagcctttggctcacggcccggtgcagtgcccccgttgcggcagtgagcacacggaaaagatcagcgagttcggttccaccgcctgcaaagcgctttaccgctgctgcgaatgtcgggaaccgttcgactatttcaaatgtatttaggagcactgaaaaccatgacggtctttcatcgcctgaatgtcgcagccatcgagcgcgaaacgccggacgccgtagccatcacactgcgcgtcccggacgaactgaaatcccattacggctatacccctggtcaacacctgacgctcaaggcgcgggtcaacggtgaagagctgcgccgctgctattccatctgtagcgcaccgcaggacggcgtattacaaatcggcatcaaggcgatccatcaggggcgtttctcttcgtttatcaaccaaagcctgcaggtgggcgacgagttggaagtgatgctgccgcagggccgctttggctaccagccgcaggcacaaacccagggcaactatctggcgatcgccgctggctccggtatcacgccgatgctatcgatcatcaaggcgacgttgcaattggaacccaacagccagttcacgctgatctacggcaaccgcaccagccgctcggtgatgtttaaggaagccctctcggatctgaaaaaccgttatccacagcgcttccaaccgctgtatctctttagccaggaaaatctcgacagcccgctgctcagtggccgcatcgatcgtgaccacctgaccgcgctgggtaacacgttagtgaacttcaacgagttcgaccacgcctttatctgcggcccggaaacgatgatggacgacgcgcacaccgtgctggagctggccggtatgcctgccgaacatattcacagcgagcgtttcaacaccagcggcatcgtcgcccggccagccaacgcaggcagccgcaacgcgactcaggtagagatccggctcgacggccgcagcctcaaaatcgacgtcggcagcgaggatgacagcattctggatgccgcattacgtcagggggccgatttgccctacgcctgcaaaggcggcgtctgcgccacctgcaaatgcaagctgaaggccggtgaagtggatatggcgatcaactacagcctggagccggatcaactggcagcaggctatgtcttgagctgccagtcctggccacgcggagaaggcgtggtgctggactttgacgtttaggagcccacgatggaaaccccttggatcctgcgcgaacagcagcaacgcgtggtcacactgacgctgcaccgccccgatgcccgcaatgcgttgagcacagcctgcctggagcagttggtttatcaactggaacaagccgatagcgacgccgacgtcggtgccgtggtgatcgccggtgccgcccggttcttcgctgccggagccgatctgcgcgaattacagctgcaggatgtcgccgccacccagctcgatcaccgccctttgctctggcagcgattggcccagttcagcaaacccttgctggcggcagtgaacggttacgcgctcggtgcaggctgtgagctagctctggcctgcgacattaccctctgcggcgaaagcgcccgcttcggcctgccggaaatcactttaggcctgatgcccggtgccggtggtactcaacgcctgatccgcagcgtgggcaagtcccgcgcctatcaaatggtgctgaccggcgaagccatcgacgcccgctgcgcactgcaaaccgggctggtgagcgaggtttgtgtcgacgcattaacgctggagcgtactcaacaactggcccaacgcatcagccaacaggcaccgctggcgctgcgcgcggccaaacaggcactaaaacaggcacaggaaaccagcctaagccaaggcttgcagatggaacgccagcagtttatcaccctggccgccaccgaagatcgccgggaaggcattgccgccttcttcgaaaaacgtacaccgaactatcaagggcgctgatttatggaaaacgcattaattcttagccacatcgaagccggggtgttgaccattaccctgaaccgccccgatcggctcaacagctttaacgatgaaatgcaccaccagctcagcgaggcgctaaccgtagcggagcgagatgacagcgtgcgttgtgtgctgatcaccggtgccgggcgcggcttctgcgccgggcaggatctgaacgatcgtaacgtcagtgtggatcaggcccccccggatcttgggctgtccgtagaacgtttttacaacccgctgatccgacgcctgagcgccctacccaagccgattgtctgcgcggtcaatggcgttgctgccggagcaggtgccgcgctggcaatggcctgcgatatcgtggtggccgccgacaacgccagctttatccaatccttctgcaaactgggcctggtgccagactccggcggcagttggtatctgccacgccttgccgggcatgcgcgagccatgggtatggcgctgctgggggacaaaatcagtgctcagcaggcgctggagtggggaatgatctggcaggtcgtggctgccgcagaactggccgatcacacccaaagcatggccaaacagcttgccacccaacctacctacggcctggggctgattaaaaaggccatgtaccgctcggccagcaatacgcttgaccagcagctcgatttagagcgcgatttgcaacgcttgggtggccgtagtgacgactatcgcgagggcgtcagcgccttctttgccaaacgccaaccgaacttcagcgggaaatagcatgagagagaaaatggcggtgaatgccatagccacctccgctacggtggccgtgattggtgccggaaccatggggatcggcattgctcaggtggccgccgcagcagggcatcaggtcaagctgttcgatatcgccctgcccgccgcctcccgcgcacttgagcagctcgagcaacgcctgcgcaagcgggtcgaggcaggtaaagccgatgcccacagcaccgaaaccctgctggctcatattcagttgaccggctcgttaagcgatctggctgactgcagcctggtgatcgaagcggtggcagaaaagttgccgatcaaacagagcctgtttcgcgatctggaggcgatatgctctaccgatacgctgtttgccagcaatacctcgtcactctctattaccgccatcgccagcgcgcttcagcatccgcagcgcatggcgggcctgcacttcttcaacccggctccgttaatgaaactggtggagatcgtcggtgggctggaaaccagcccggaaacgctgagcagcctgcaaaccttggctcaacaatggggtaaacacagtgtcgtgtgccgttctacgccaggctttatcgtcaaccgcgtcgcccggcctttctacggtgaaaccctgcgcgctctggaagaacagattgccgatccggccaccctggacgccgtactgcgtgatgctggtggcttcgccatggggccactgcaactgacagatctgatcggtcaagacgtcaactatgccgtcaccgaatcggtctatcacgccttttatcaggacagccgctttactccttcactggtgcagcaggaactcgttgctgccgggcatttgggccgcaagagtggccggggtttctaccgttatgacagtgagcaggccctaccgtcagcaacttttgcttcggcggtaacggctgacttgcctcagtccgtcacgttgcacggcgactggtcggccatgggcgagtttgcacagttgctgacgggaaatgcggcggcgatcaaacatcctggccagaccagtccgtttgctcggatcgatgaagttacatttatgttaacaaatggtaaaacagcaagccaagtcgccgaagaaatcggatcgcccgtggttctattcgacctgtccgtcaactatcagcacgcccccgttatcgccatcagcagcgccgaacagaacacggtgccgcacacggccaaggtcatccgcctgctgcaatcgctgggtaaacaggtgatccacctgccggactacccgggcctactggtgatgcgcaccgtcgccatgctggctaatgaagccctggacgtggtgaacaaaggcgtggccaacgccgccgataccgacgatgccatgcggtttggcgtcaactacccacaaggtccgctggcctggggcagcaagctcggctggcaacagatcctcaccacgctggaaaacctgcaacgttattacgcagaaccccgctatcgcccaatgccgctgctgcgccgttatgccgccaattattcaggagcccaatgctgatgaatgccaacactccccgcgcgctggcccagcgctgcgccgaacagatgtttagccaagatacttgtgcacaggcaatggatatgcgcattgatgccgtggatgtcggcatggccaaggttagcatgaccgtcggcccgcagatgctcaatggccaccagacctgccacggtggccaactgttcagcctcgcagataccgcctttgcttatgcctgcaacagtcaggggctggcagcagtcgcttctggctgcaccatcgattttatccgtcccgcgctggcaggcgaccgcctcaccgcctgcgctgaagtgcgccatcagggtaaaaccaccggattgtacgacgttgagatcgttaatcaattagggaaaaccgtcgcctggttccgtggccgcgcccatcggttgggccacagcattttaggagagcagccatgaatcaggcttttatttgcgatggcgtccgcacgccgattggccgttacggcggcgcgctggcaaacgtgcgggccgacgatttagccgccctgccgctgcgtgctctgttggagcgccaccccaacgtggactggtcacgggtggatgatgtcatcctcggctgcgccaatcaggccggagaagacaaccgcaatctggcccgtatggcggcgctgctggccgggctaccacaaaacgtttccggcaccaccatcaaccggctatgcggttcggggttggatgcgttggcgatggcggcccgcagtatcaaggccggtgaagccagcctggtattggccggaggagccgaatccatgacccgtgccccgctggtcatgggcaaggcggacagcgccttcagccgtcaggcacagatgtttgataccaccatcggctggcgatttgttaacccactgatgcatgcggctttcggtaccgactcgatgccagaaaccgccgaaaacgtcgcggcgcagtttggcatcagccgtgccgatcaggatgcctttgctctacgcagccagcagcgcaccgccctggcacagcagcgggggatcctggcacaggaaattattccggtgagcctcagcggcaagaaaggagtcattactcagttcagcgaagacgaacacccacgcgcagaaaccacgttggagcaactgcaaaaactgaaaacaccgttccgtcagccgggttgtatcaccgccgggaatgcctctggcgtcaacgacggtgcggcggcgctgattgtcgcttccgaagccatggccttgcagcaaggtttgacgccacgggcacgcattgtcgctaccgccacctgcggcgtggaaccgagattgatggggatcggcccgctgcccgcgacccgcaaagttctggaaatcgccgggttaagcctggcgcagatggacgtcattgaacttaacgaagcattcgccgcacaggcgttggcggtgttgcgccagcttggtctgccggatgatgccgaacaggtcaatcccaacggaggtgccatcgctcttggccatccattgggcatgagcggtgcgcgcctggcgctggccgccctgtttgagctggaacgtcgcgctggccgttacgcactgtgcaccatgtgcattggcgtcggtcagggcattgccatgattatagagcgtgtctaacacctgcgaggctaaaaagatgactacaaatccacggcccatcgacgcgattgaatttgcttcacgcgacgaaatcgaagcattacagctggagcgcctgcaatggaccctgcaccatgcctacaacaacgtaccgatgtatcaacgcaagttcgaacaggccggcgttcacccgagcgatctgaagcaactgagcgatctggcgctattcccctacaccaccaagcaggatctgcgtgacaactacccgttcgacacctttgccgtgccgatggaacaggtggtgcgcattcatgcttcatctggcaccacaggccgcccaacggtcgtaggttatacccagcgggatatcgataactgggccgatattgtcgcccgctgcctacgctctgccggggccacagccaaagacaaaatccacgttgcctacggttatggcctgtttaccggcgggttgggcgcgcactatggcgcagaacgtctgggcgcgacggtgatcccgatgtccggcggccagacggagaagcaggtacagctgatcctggatttcaaacccgacgtgattatggtgaccccttcctactgcctgacgctgatcgacgagctggaacgcaaaatggggggcgatgcgcgcaactgctccctgcgtttgggcgtgttcggtgcagagccctggtcagaatccctgcgccatgagatcgagtcacgcatggggatcaaggcgctggatatctacggcctttccgaagtgatggggccgggggtagcgatggagtgtgccgaaagcggcggcggtccgaccatctgggaagaccacttcctgccggagatcatcaatccggaaacgggcgcgatacagactgacggcgagcatggcgaactggttttcaccacgctgaccaaagaggcactgccggtgatccgctatcgcacgcgcgacctcacccacctaatgccaggggatgcccgcaacatgcgccggatgggcaaaatcactggccgttccgacgatatgctgatcattcgcggcgtgaacgtattcccgtcacaggttgaagaacagattatgcagttcgagcatctgtcgccgcattatcagttgcaggtgagccgtgccgggcatctggatacgttggccgtgcgggtggagctgaaagagtcggctctgacgctcaaccaccagcagcgttgcgatatctgccaccagttgcgtcaccatatcaaatcgatcgttggggtcagcaccgacgtcagcattgccaactgtggcgatattcctcgctcggaaggcaaggcccagcgggtgatcgatctgcgaccacgttaagttttgccccctcaccctaaccctctcccacagggagagggaaccgatcgagtgtgcttgaaattagtgtgactcaccttggatggggaggcgatcacgtttgcggaggctacctctttacttccaaacgagcaggg

SEQ ID NO: 199 - DNA, 135978 bp, unknown
  Altogen  635822 strain
  misc_feature (17009)..(17009): n is a, c, g, or t
  misc_feature (73144)..(73149): n is a, c, g, or t
  misc_feature (86120)..(86165): n is a, c, g, or t
  misc_feature (108969)..(108969): n is a, c, g, or t
  misc_feature (135885)..(135951): n is a, c, g, or t
gggttagggtgaggggcgtcactttacgtatcctgatgtatttctttgtctaattggcggatatagcgggaaatgccactcatcgacaaagtgataaatctttcacataagtcgttggcgacatccaggaaattttatcgcacgtgaaatagccgtcatgtatgagtttgtagtttacatacaaggagaccggtaaactaaaaagtattgataccagtgctaacctggttaaatgtttaacaactatcatattatgtcttggcaatctatcgaaaataaagaaaaaaacagaaccagataaggcatagagtatcagaggtgatccaaagaagcacataaatatagaggctgaaaaagttatttcatccttcattaatatcaatgaagtggcgtaactgtaaatcattaaagttccaccagtgaatataattagcagtactgtagtacctaatactttccaaaaacgattcttcatgctcacttccctaacccattaaggatgtgttgaaagtttgcttcaggtgttcttggtttaactttcatcctctccttcagtaaagctatcaatttattgcttataccataatgcttatctatgttatctaaaattgcaactataaaaaaaccagcaataaacgagaatacaaaagcgtacccccctaactatccctgtattaatgccttgctgcccgatacccatcgctaacatctgcggatggttggcggcataccgcgtgccagttatggttcgccgaagcccggcataacctgatatatgaataaggttcacgccatttgcccctgtgaacaccgtggcagttattcctaatttcttgaattcaaggatgacatcatataacccacgcgcatcatttatattgcctgcataagtagaaacaggatctgtcactttaaatacagaagagaggacatttttgggttcaatacctctggcgaacgcatcgccacggctggtactttgttgctcaaagccccgagcgaacgcttcaccacgccccatacctggatttcctgggcggcgcgagtcgatgtcttcaaggataccttttgcctcagcgagcgtgagaacgacgtgatattgcgtgttatcgcttaatgctttctctaagccgatagagtcaagaaactcatgttggggttttagctggttgatcccgacattacccttcaggaaatcccccatgtagccttcccaactcgggttgaaatttttatctgacatgatctcactccattgatagttctaagctttccactccattgaaaaataaactctagcactattggtaagcattgtgaatgagtataacttaatgcggcgttctgctattgtctcagccacataatcagcccctataggatcgcagatggactgccgtgccgactgtggtgcctgctgtatcgcaccttcgatttccagcccgatccctggtatgcccaacggcaaaccggccaatacccgttgcatccatctggaccagcaactgcgctgtggaatatttcattcgccgctgcggcccaaagtctgcggcagcctgcaggccagccgtgaaatgtgccacgatcgccgtgatgaggcgctgatctatcttgccaagttggaggtggataccgcgccttgaacgtccttcagccgccacaggcatagcaccgcacccaggaccatcgccaacgcaaagtaaaataccgcgtgataactccacatttcagccacgaccccggcgatcgaaccggcaataatccagccaacgcgggtggtattggtaaacagcgtggtggccgccccggcctggccgggcatcaaatcctgaaaatagagcataccaatccccgccagcaccccgataaacagcgcattcagcagttgcagggcgatcagttgccaagtaccggttataaacagtagcccggcatagaacagcaccccggcaatcaccgcacaacgcatcaggaagcgtttgccaaagcgttgggccaccatgcctgcgagcaacatggtcgggatttccagcccggcagcggtacccatcagtattcccgtcagtttttccggtaactgcagttcccgcaccatgtacagcggcatattgatcaaatacatgctgttggccgtccacattaacgtgcaggccataaacagcaataacgtatcccggcggttctggcggggggcttccagcgtcgctccgccagtactctgcacttttggcatggagggcaacatcttccataccagcgctccgcagagaataaaggctgcggcggcggccagatacatcaccttaaaaccaaaccccaaggccagcgcaaaggcgatcggtgggccaattacccaggccagcgaaacctgagcacgcaggatagaactgaacatcaccgttccccggccggtgtgctcggcatgttctcttgccagggcaaacatctgtgggttggcggtcgagccgaagctgctcagcaacacgccgacgaacagcagcaggtaatagttacggttccaggcgaacagcgcacaagccaaggcacccaacatgcagcaaagaaagatcagtgatttgcgatcgcccctcttatctgagcggctggccagaaactggctgaccaaaatgccgatcaccgcgctgccggtaaagaacagcccgaccatcgttggccgtacgttcacttcggtggagaggaacagactcagcgtgggcgtctgtaaggcaccggcaatcccggtgagaaaagccacgaccagaaatgccaacgacgttaaatcgggcaagcgtcgtgtcgccgcagttgaagtacgcataagctgaatgaatagccaaagagaagggagacgcgcgcataatacgctcgtttaaaaaaaacaaaaacctgtttcaatcaaggaatgggtaactagatggtatctgtcggcagaaaaagagcagggtgatgtcaccatcaccctgctctggtggctagcggttatgcgccagcaggaacgtcatgcgcggtattcttcagcacttcaccctgatatttctcaatttccagctgtgccatctggccacagttgccctgggccaggttggatgagccaatatcgaaagtcaggcagttaacgttgccgttcttacagatcgaccccggcgtcgacggatcggccggatcgtaccaggccccttcgctgatccgcaccgcacctggacgcacgtcctcactgacaatggcaccaaccaggatctgtccacggtcgttaaacgcccgcaccaggtcgccgttggtgatattgcgcgatttggcatcctctggatggatcaagatcgcttcacggtcggccaccgcatacttcttacgcagcggcgtgttgtcgagctgtgagtgaaggcggttggtcgggtgcgcggtattcagtgacagcgggtatttggctgcctctgggccacgataccattcatgcggtggcatccaggtaggaatacctttgcaatccagatactccatcttcgagatggcatcggagtagatctcaatcttgccggaaggcgttcccaacggattaagcagcgggttttcacggtaatcggcgaaacgtacccactgtttgttttcctgcgggatcgggaaacgaatgtagttgttcgacgcccagaacatgtcaaacggcggcagggcaacgcgggcggcgcgggcctgcaacttcatgtcgtcgtacatgcctttcagccactgggtttcatccttgccttcggtaaaggcatccagcacgccgagcttggcggccagagcggtgaagatgtcgaagtcgttgcgtgactcatgctgcggcggcacgcactgatgcatcgggaagacgtacagctgcgagtagtcaccgcccatctccagatcgttacgctcatagctggtggtcgcgggcagcacgatatccgcatgcttggcggtcgccgtccagtacggttcgttaaccacgatggtttccgggcgctgccaggctttgaccagattgttggtgtcctgatgctggtggaaggtattaccaccggccacgtacaccatcttcacgtctgggtaagtgacatcggtcccattgaagtgaatggtcttgcctgggttggtcaggcattcggcgatacgagccaccgggattggcgttggtgaatttttcggtgcattccccgcagagataccggagaggatgccgcctttggccgttgggctaccgccggaagagtagtgatagctgaagccaaagccgccgcctggcaggccgatctggccaagcatggccgccacggtcaccagcaaccagtgctgctgctcaccgtgatgctgacgttggatcccccagccgcccatgatcatggtgcgctgtttcgccatatcgcgcgccaactggcgcagcacttcggcatcgacgccgctgatatcggcagcccactcggccgttttcggcgtaccgtcggtttcacccagcagataggcctggaacttgtcgaagcctacggtgtaggttttcaggaagtccgggttatgcagcttttctgtcaacagggtgtgggcgataccgatcagcatcgcactgtcggtgtacggacgcggagcgatccactgtgcgccgacatatttggcactgtcgctgtgcaccggatcgatgctgatgatgcgggtgcctttcttcttcagcgcctcaaagccggtctggccgacgtggtcgggtacgttccagctgtttttcagcgtaaccatcgggttacagccccacaggatcaccagttggctgttgtcgatgacgtttggccaggcggtttgctgttcgtaaacctccattgaccccatcacgtgcgacatgatcacctgtgcagcaccggtagaatagtcaccggcgtagccaaggaagccgccgctcaggttcatcaggcgttgcagcagggtacggctgttgtgcagcctgcccacgcttttccagccgtaagaaccggcatagatcgactgcgggccgtgatctttttgcaaacggacgatttcgttaccgaccagatcgatcgctttttcccaactgacgcgcacccattcatcgttgccgcgcagttcggtgcggctgccagggccgccttccagccagcttttacgtaccattgggtacttgatacggttttccgcatggacctggtggggagccatggtgatcagatcgttcgggtaaggatcgtctttgaccggcaacacgccaaccatttttccgtcttgcacgatggcttcaaatgcgccccagtgcgccccggtcaggatgcctttctgcgcctgacgtaaggccacaaactgtggcaaggcttggctgatggcttccgccaacgccgatttaggccataggcccgcaaatagaggcacggcggccaaggcgctggcaccggtcaggaaacgacggcggctcatggccaatggttgttgttggtacttgctcatttcgcttctcccttaacttttggccggtgtggcaggttgcatatcgctggcatgtttctgaacgtactgcgtcagaacgcgcagttgttcttgtgacagcgaggtgcgaggagccatacctttaatcacgccgatccactggttggcgttgaagcgatcaagggcggtcaggccgtggcagccggtacagttggcggacatcatatcggcagtgtaacgccagattttctgctgatcgtcgatcagttgcttacgtggtaaccacacctgcaatgaaacctggtgccagaccaggccagtttcggcgtcggtcatggtactgccggttttcagcagtttgcgcgcatcttcgcccagcaggacgctgaggatacgtttaccttgcgcagcgtagaatacttcgctgacgccatcctgttgccagccgctgacgtcaaccagcaccttgtcaccttcctgtttcacgacgtgaacttcagttgaaggcatcaggttaccggcattatgcgtatcgtcggctttcaggaagaacggttcggtggcgatggtgaacagcgtggtcgctgttggagaggtttccgccgcggctttcgccagttcggcagcgccagcctgtgcggcaccgctcatatccggcaggatatgcgcaacgcccttgtggcagtcgatacaggtttcgccttgcttgatggccaccgggtgttgaatacgggcttcaggacgctgggcggtgatatccatggcatcaaaactatggcaagaacggcaggtggccgaatcgttttctttcagcgttttccacaccgattgcgccatggccagcttatgggcttcgtatttttccggggtgtcgattttgccggtcatttcgccgtaaatgtctttcaccgcgcggatcttggtccacaggtaatcgagcggctcatgagggacgtggcaatcggcgcattcagcgcggatccccttggcgttctggaagtggacactgccttgatattcggccagaggttgttgcatggtgtggcaggagacacagaaggcggtatcgctggttttatggaagaccgttgcggtccctgccagcagtgcggcaccgagaataatcccgatcaccaaaatccaaagccatccccaccggcgtcgcttttcaaagccagcttgttttttgctcatattgaacccacttatagttatgaaataccaaggaaaaacttgccaaaaaggtttcgacaccaggtcaaaaacacctggataagtataggtattttcgcaaaagaaacctaataccttaggggtatttacagtgaaaagtagagtgattgagcaataaattagcgttatattctattttacataacgctatgcttgagatgaacagaggagaaattacagggggtaacgtcataatataggcagatatacctgttggctcaaccataggtggatcgccgttctgctcgcttcaaaatgaggctccggcaggtcgtgcggggaacaccagcaccattcggcacatttttccggctctttcagctcggcttcccctcctggatgctgaaccagcatacagatcgacaccgtatgttttccctctgcccgccaggtttgcagattattgctgacaccaataatggttggcggagctatctgcaacccggtctcttcggcgatttcgcgttgggcacactgctcaaaggtttcccccgcgtcaagatgacccccggggatcgaccaaaaaggggcatgggtgctgcagcgtttccccagcaggatttgcccttgagcgttaacgattatgaccccgataccggtggcaaccatgttgttatcttccttcagcactgtttcagcacagtatgccattttcccctgtacatgggggctttagccagaaaagtgtgcgtaaggtcaaaaaactatcacgccgagatcgagaaaacttgctttcggtgattgctgctcacacactcattgaaacgtttcagcgtcatcgatggcctggttaggcgatgggtaacgctcctttttcttaacttggctgaaacgattcaattcagcaggagaggagaaccatgttccagttgtcacagcaagatattcacctgggagctgccgctagcggcaaacaggaagccatccggcaggtagcggcagcgcttacctctgccggatgcgtcagcgccgcctatgttgacggcatgctgcagcgcgagctgcaaacctctacttatctgggcaacggcatcgccattccacatggcactacagatacccgcgatctggtgctgaacaccggtgttcaggtattccagtttccacagggtatcgagtggggcgaaggccagacggcctatgtggtgatcggcattgctgcgcgttctgatgaacacctggcattactgcgtcagctcacgcacgtgctcagtgatgacagcgtcgccgaacagctggcaaaaacgacttcagccgaagaactgcgcagtttgctgatgggcgagaagctggcggctgaattcaagtttgatgcctcactgattgctcttgatgtggccgccgattcgctgatgacgctgcaagctttgaacgcgggccgtctgcaaaaaatcggagcggttaacgcccagtttgtcagcgatgtgatcacccgcaaaccgctgaatctggggcagggtatctggttgagtgacagcaccgaaggcaacctgaccagcgccgccaccgtcagccgcccggcacaggcgtttgatgaagaaggcgaaaaggtcgcgctgttgctgaccgtcgccgtcgccgatcaacaaccgctgacggtgctgaactacttaagcgatctgttagtgagccaaaaagctgaacgcttgctgaacgccgatgcggtgggcgtgctggcgctactgaccagcgaagttgccgaagagagcgcggttctgagtgcggaatacgtagtgcgcaatgagcatggcctgcatgctcgccctggcactgcgctggtcaacgtaatcaaacagttctccagtgaaattaccgttaccaatctcgacggtagtggtaaaccggctaacggccgcagcctgatgaaggtcgtggcactgggagtgaaaaaaggtcatcacctgcgctttaccgccagtggtgacgatgctgaagcagcgctgaaagccatcggcgaagccatcagtgaaggtcttggcgagggtgcagcatgagcagaagagtagcaaccataaccctgaatccggcttacgatctggtgggcttttgcccggagatcgaacggggcgaggttaacctggtaaaaactgccggtctccatgcggcaggtaaagggatcaacgttgccaaggtactgaaagatttaggtatcgacgtcaccgttggcggtttccttggtaaagacaaccaggatggtttccaactgctgttcagcgatttggggattgccaaccgtttccaggtggtccctgggcgtacacgtatcaacgttaagctgacggaaaaagacggtgaagtgaccgatttcaacttctccggttttgaagtgacgccgcaggattgggaacgctttgtggtggattctctgagctggctgggccagttcgatatggtagcagtcagcggtagcttgcctgccggggttgctccggaagccttcactgagtggatgacccgcctgcgtgcgcagtgtccgtgcatcatttttgacagtagccgtgaagcgctggtggccgggctgaaagcctcgccgtggttggtaaaacctaaccgccgtgagctggaaatctgggcaggcaaacccttgccgaagttggacgatgtggtggaagccgctcacgccctgcgtgaacagggcatagcccacgtggtgatctcactgggtgctgaaggtgcgctgtgggttaacgcctctggtgcctggatcgccaaaccgccagcctgtgaggtggtcagcaccgtgggtgccggtgattccatggtcggcggcctgatctatggcctgctgatgcgtgaatccagcgaacataccttgcgcttggccactgccgtggctgccctggcagtgagccagagcaacgttggcatcaccgatcgcccgcagttggccgcgatgatggcgcgcgtcgatctgaaaccctttaattaatcgcaggagtcagaatgaaaacgctgctgatgatagacagttcgctcgggcaggctcgtagccacctggcgaaacgcatgcttgaggccgctgcggccaaaaccggcctgacgctggttaacacggccaacgaggctgaactggtggtggtagcgggtgttgctgcacctgctgacgctgagctgaacggcaaacaggtttatatcggtgatgtggaacacgcggtgcgtgaacctgaagccttcctggccacagcacaggcgcaagccaaaccgtatcaggctccggcccaggcggtagcaccggcaaaatctgccggtccgaaacgtattgttgccgttaccgcttgcccgaccggcgttgcgcatacctttatggcggccgaagccatcgagagcgaagccaagaaacgtggctggtgggtgaaagtggaaacccgtggctccgtcggtgccgggaatgcaatcaccccagaagaagtggctgcggctgacctggtgattgtcgcggccgatatcgaagtggatctggacaagtttgccggcaagccgatgtaccgcacctcgaccggtttggcgttgaagaaaaccgcgcaggaactggataaggcacaggtagaagccgagatcttccaaccgcaaaaaagtggcagcaccgcgagctcaggcaagaagaaagagagcgcagggccttatcgccacctgctgaccggcgtgtcttacatgctgccgatggtggtggcgggtggtctgtgtatcgcgctgtcattcgtgtttggtatcaaggcgtttgaagtcaaaggtacgctggctgcggcgctgatgcagatcggtggtggttcggcctttgcgctgatggtgccggttctggcgggctacattgcgttctccattgcggatcgtcctggcctgactccgggcctgattggcggtatgttggcggtcagcaccggtgcgggtttccttggcggtatcattgccggtttcctggcgggttacgtggccaaggccatcagcggtaagctgcgtttgccaccgagtatggaagcgctcaagccgatcctgattattccgctggttgccagcctgatcaccggcttgatcatgatttacgtggtgggcacgcccgtcgccaagatcatggttggcctgaccaactggctgcaatcgcttggcaccgccaacgcggtactgctgggcgcaatcctcggtgcgatgatgtgtaccgatatgggcggcccggttaacaaggcggcttatgcctttggtgtggcgttgttgagttcttcggtctacgcacctatggcggcgattatggcggcaggtatggtgccaccgctggcgatggggctggcgaccattctggctcgtcgcaagttcgagaagtccgagcaggaagggggcaaagccgcgttggtgttgggcctgtgctttatcactgaaggggcaattccgtttgctgcccgtgacccgatgcgcgttctgccgtgctgtatcgctggtggtgctttgaccggtgcgctgtcgatggccttcggtgcaaaactgatggcaccacacggtggtctgttcgtgctgttgatcccaggtgctatctcgccggtgctgctgtatctgctggcgattgtggcgggtaccctgctggcgggcgtgggctatgcggtcctcaaacgctctgaagcgccggtagccacggtcgcgtaacgacaaccacaaaataaaaaaccggcatctgaaaaatgccggtttttttatgtctgcagaaaaattactgctgcgctttcagccaggcaatctcctctgcccagatatccgggttcaccgtctccaggatcagcgggatattatcaaagcgcgggtcgcgcatgatatagctgaacacggtcttaccgatattgccttcacccaggctgtggtggcggtcaacgcggctgccaaactcgctcttggcatcgttaagatgcataccgcgcaggtagttaaagcccaccacgtcacccagctctttaaacgtcttctgacagtcctcttcgctacgcagatcgtaaccggcggcgaaagcgtggcaggtatcaatacagacgccgacgcggctcttgtcttctacaccgtcgatgatcgccgccagatgttcaaacttgaaccccagattgctgccttgcccggcggtattctcgatcacggcggtgacgccctgggttttatccagcacgatgttgattgactcggcgatccttgccaggcatttatcctcatcgatctgcatcaggtggctgcccgggtggaagttcagcagcgtcagccccagttgctcgcagcgttgcatctcatcaagaaacgcctcgcgggacttctccagcgcgtccgttaccggatggccgaggttaatcagatagctgtcgtgcggcaggatctgccctgggccgaagccgtactgtgcgcaggcacttttaaacttgtctatcacgtcggcaggcagcggggcggccttccattgacgctgatttttagtgaacagggcgaatgcggtcgcctctaattcgtgtgcgcggatcacggcctgatctacgccgccagaagcgctgacgtgtgcaccgacaaacttcattttcattctcctgtgttaacgctgccattatggcattgataagcgaaggattgaatggcgggggtaaaacaagcaggcccgaaagctcgggcctgaagaggggggatcacaacaggtgctgcaccaacaggttgattgcaccgccgccaacgatcagccagacgaacagcagcgtcgccagcaagatgggtttcacaccagcctgacgtaccgcgctaatgtgggtggtcagacccaaagcggccattgccatggccagcatccaggtgtcgatggtgatcagatgctgtaccagcgtggccgggatcaggttgaacgagttcagcccggcaacggcgatgaacaatacggcgaaccacggaatggtgatggccgatttttcactcttgctgccgctgccgctgccggcccggcggctgatatagccagacagcaacagcaggaacggggccagcatcatgacgcggatcatcttggcgatcaccgccgcgttttccgcatccgggccgatggcatggccagcagcaaccacctgagccacttcatggattgtcgaacccgcgtagatgccgaaggtttcctgcgtcaacggcagccactggaagtgctcattcagttgatacagccacggataggcaaagatcgccagcgtaccaaacaccactacggtagagactgcgacggcaaccttgctggagtccgccttcagcaccggctcggtggccattacggctgcggctccgcagatgctgctaccggcaccgatcagcatggtggtttggctatcgaggccgaacacttttttacccaaccagcaggccagcaagaaagtgctgctcagggtcagggcatcgataatgatcccgctggcccctacgtcggcaatttgctggaaggttaaacgaaagccataaagaatgatccccaggcgcagcagccgctgtttggccagctgtacgccggtatggcagctaggctgcaaccagggataaagagtgttgccaaccaggatgccgaacaggatcgccagcgttagagcgcctaatcccaacccggcaatccagggtacatcgcccgcccagaccgaaaacgcggtcagcgcgccggtcagcagtaagcctggtatcaaccggggtagtccaaacaggggaaaacgctgttcgggatagggttgagtgctgtgactcgccatgattattctgtcctctgctaaattcctgagtgcaatgataaaagcaggtgacctaaaagagaaattgattatatatttataacctatcggaataagtggtttatcgcctggacggttcggctacgtcgccaagcctaatcctgtaaacgtgataaccttataaggcagggcggtgagcttaccgacgccgtgtgactgtttttttggtgttttaatttaaatggttttgtctttaccctatggatttcaagcgcaggtaacaacgcggcagcttgaaagacgcgggtataaccattctctttatgtcgaggctgttatgcatatcactttgcgccaactggaagtttttaccgaggtgctgaaaagcggatccaccactcaggcctcagtggtattggctttatcacaatcggcggtcagcgcggcgctggccgatctggaaggacaactgaaggtgttgttgttcgatcgcgtgggtaaacgcctggtgatcaacgaacatggccgcttgctatatcccaaagcactggctctgctggaacaggctggggaaattgaacagctgttcctgcatgacagcggcgcgttacgtatcgccgccagcagcaccatcggcaactatatgctgccagagatgattgcccactatcgcaaagattttcctgctactccgttggaattgaatgtggggaatagccaggaggtgattgttgcagtagccgattttcgtgtcgatctggggctgatcgaagggccgtgccacatgcctgagttggtcacccagccgtggcttgaagatgagctggtggtgtttgccgcgccggataacccattgctacggcaaccggtgactctcgcaacgctggccagtgccccttggatcctgcgggagcgggggtctggcacgcgggaagtgctggatcatttgctactggcgcacctgccaaacttccagttggtgatggagttgggcaactcggaagcgatcaagcacgcggtgcgccatggtatcggcatcagttgcctgtcacgtcgcgttgtggaagaacagctggctagcggagccttggtggaactgagtctccctctgccgccattgatgcgcacgctgtatctgatccatcaccggcaaaaacacctttccaatgcgctacagcgtttcttgagttattgcgttgggcaacatccgctcaaggtggcataaagtcatcattaggaccgctgctaataattggccgcggattatgaagctatcttatatcagggcaatgttactagttcgctggcgggtatttgttacaatccggccctcatttttgacgagcagatagggtaagaatggctcagcaggatataaaaacagcggggcagcaagcacccggattacgccgcgagctgaaagcgcggcatttaaccatgattgccattggcggttccatcggtaccggcctgtttgttgcctctggcgcaacggtttcccaggcaggcccaggcggtgcgttactctcctatgcattgattggtctgatggtgtatttcctgatgaccagcctgggtgagctggcggcgtttatgccggtttcaggatcgttttccacctatggtgccaagtatgttgaagagggcttcggttttgcgctgggctggaactactggtacaactgggcggtgaccattgcggtcgacctggtggcgtcacagctggtgatgaactactggttcccagacacgccgggctggatctggagcgccctgttccttggcctgatgttcttgcttaactacatctcggtcaaaggcttcggtgaagcggaatactggttctcgctgatcaaggtgagcacggtaattatctttatcggccttggcgtactgatgattttcggtatcctgaagggcggtgaaaatgccggttggcataactggacgatcggtgatgcgccgtttgccggtggcttctcggccatgattggcgtggcgatgatcgtcggcttctcgttccagggcaccgagctgatcggtatcgcggcgggcgagtcggaagatccgggcaagaacattccacgcgcggtgcgccaggtgttctggcgtattctgctgttctatatcttcgcgatcctgatcatcagcctgatcattccttataccgatccaagcctgttacgcaatgatgtgaaagacatcagcgtcagcccgttcacgctggtattcgaacatgctggcctgctctctgcggcggcggtgatgaacgcggtgatcctgacggcggtactctctgcgggtaactccgggatgtatgcctcaacccgtatgctgttcacgctggcttcggaaggtaaggctccacgcattttcgccaagctgtcaaaaggcggtgtgccgcgtaatgcgctgtatgccaccaccgtcgtggcggcgctgtgcttccttagctcgatgtttggtaatcagtccgtttatctgtggctgctcaatacctcgggcatgaccggctttatcgcctggttggggatcgccatcagccactaccgtttccgccgcggctatgtgatgcaagggaatagcctgagcgatctgccgtatcagtccggtttcttcccgttggggccaatgtttgccttcgtgctgtgcttgatcatcacgctggggcagaactatcaggccttcctggcggaccgtatcgactggtacggcgtgacggcgacctacatcggtattccactgttcctgattatctggttcggttataagctgacgcgcggcaccaaagtggtgaagtacagcgaaatggaattcccgaagtggaaccctgacaagtaagtgattggctctagacgcggcgggttaccgccgcgttatctccccgtaaaaatccccccagttaaacgctaaccaaaaaaagggccgcacgatggcagccccttgttacaaactatgctcggcaatcagaagttgtaagtcatgcccacggtataacgacggccatccagcgtggtgttgtagtgttcgtaatccacggttttatccagaatgttgtaaaccccgccgctaagctgcaggtttttaagcgcctggtaactcaccccggcatcaacaaaggtataggatggcgtgctgaccgccattgaggtacggctcaggtattccgaggtttcgctgcggaagttaacgcgtgaccacaggccgagatcctcagtggcttgccaatccagcacgccgttgatcatgtgcttcggcatctggttcagcgccttgccctggaactcaccgctcttttgttcagactcggtaaaggtgtagttggtgctcagcttccagtcttcggtgatctgccagccggtggtcacttcgacaccgcgcatattggctttatccacgttgacgcggtcgctgacgaaatcataagtggtgttaccgatggtgcaggccggatcctctgaactgttacagcggcgaacttcggtgatcttgtctttgaaatcggtgttgtacagggtgatgcctgcgttcagcccctcctggttatcccacagtatgccaacctcttcactgatgctcttctctggtttcagattcgggttacccacgatgatgccgttgctcacgccnccccacgatgatgccgttgctcccgccaccgccggtgatctggccccagtttgcagaggactggcgcaggtctggcgagcgataacccgcagaaaccccgcctttcacggtccacatctctgtcaggtgccacacgccatacatgcgcggtgtccagtggctgccgtagttctgatcgcgatccatacggatcccggtggtcaggctgaaatcgttggtcagcgcccattcgtcttcggcgaacagcgcccagctccagcgggtcaactggtctaaaccgtcagctgcttccagctggttgccaccgtcttgcaatttctcgtaacggtattgcccgccgaggttcagcatgtgggagccaaggtcaaactgggtctgggtattgaagatggtgttgtacatcttcatgttacgtccggggttattggtctcttcgcgctgaatgtagctggtgctgttaccaaagtcgtaatagccgttatgggtgatcgagtagttattacgggtatacaggttgtcgctggaggagttcggcttacagacgcctttgcggcagttttctaatgctacggacttacccggcgtgctgttgcgatcctgcagggaacggccgatttcgaaatcaaaatcgttcttttcatccggcgtcaggctgaataccgccgtgccgctgcgcatacgctgttcgttaaagccattggtgaagtggtcttccccacgatgggagaacagaccattcacccgcaggccaagtagcccttcgatcagcgggccggaggcgtaggcgttggtctggtagatatcaccggaatcccggtcttcctgaatggtggcatcgccttgcagggagccaacccagtctttagtggtcgaggttttgcgcgtgatgatgttgatcaccccgcccatggcatcggatccatagagtgaagacattggcccgcgtaccacttcaatacgttcaatagcctgcaatggcggcaaccaaccttgctcgataccggcattatcgctgttagggcgggtgcctcgcgtatcgacacgtttaccatcgatcaggatcagcgtgtatttggaggacataccacgaatgctgatatcgctgctgctggcaccgccggttaccaccacgcccggcacgtctttcaacgcatcggtgacgtcacggtaggcgcgggtttccaactgttggcgggggatcaccgaaatggtggccggcgaatcttgaattctctgctggaaaccggaggcggtgaccaccatggtatcttcagtttgtgccagagcgctgccgctggcgagtgatgcgaggattaacgcggttaaagtgttatagcttggcttttccatgggttaaatattcccgtcccgaggtcaacaggttttcctgttagttgtttgatttaaaagaatatgttttcacgctgccgcgagaatttccgttgcgtgagtaaaacgtcaggccattgtaaggaaattgacagaaatgtaaatgcaaatgataactcgtatcatttgtatatttgatcagtaatgtattgaaaccagaggaaaaggagggggatagcccggcgcactgcagtggtgcgccggggggaggtcagcgtttctggatgtaagtgatcgccagtgccaatgccagcaccagccctttaatgatatccatggcgtagtagggcacggagagcatcaccaggccgttttgcaatacgcccaggataatcgcgccaaccagggtgcccagagcattaggcttgccggagcccgccagggagaaaccgatataggctgctgctaccgcatccatcaggtaaccgccaccagcgttaacctgtgaggaaccgatacgtgacgccagcaaaataccgccaaggcccgccagcagggaggaaagcacgtatgcggtaaccctgtaacgtaccgtgcggataccggaaagcctggcggcctccgggttaccgccgatggcatacatccggcggccatgcttggtcagcgacaggaaaagctgcatgatcaccgtcaccgccagcataatcagcacgatcaccggcacctggcccagcgtggaaaacacttctgggatcacgccttcggccatatccccgttcggcagcaccatattctgggtgatggagccgccgtagctgtaggtcatggccacgccctggataacgaacagactggcgagcgtggcgagcatatcggggatcttcagcaccacgatcaaaaaggcattgaacaggccgaccagcgtgcacagcagcagcgtcagcacgatggcaccggtagtgccgaagccgtaccaggcaaacagcgagatcaccaacgcattagccaacgacgccgttgagccgacggagagatcgaagccgcccaccgagagtgagatcgacacgccaatggcaatcaccgtcacgatggcgatcgaacgcaaaatgttgatgatgttgttggcatcgaggaaattgtcggaagccaggccaaacagcgcgatcaaggcgacaacggtgagcaacatcccccatttatacaaaaactcaaacagctggtggcgccagggcagaacgcttttcagggataattctttactcacgcaggagttcctccggtggaatacagtaatagggtttcttcatcaatatcggcggcgctgagttctgctaccacgcggccatcccacagcacgcagatacggtcgcacaggcccaccagctcggaaaactcgccggaagcatagataatgcctttgccgtcacgtgccaaaccgtcgatcagccggaacaaatcctgtttggccttgatatctacgcctttggtgggttcgtcaaagatcagtacctcggcgttgccacgtaaccatttaccgatcgccactttttgctgattgccaccagacaggcgagccagcttttgctgtgggctagaggccctcacgccaagccgctgcataatctctaacgcccagcgcagttctcggcggcggctaaacaggctccagcgtgagaagctgtcatcggcgctgacgctcagattcatcgggatggcttcgtggataaaaatgccttccttgcggcgctcttccggcaccagcgccaggccttgtgctaccgaaagatgtggcgaatgcggtgcccagggtttgccgtgcagctctccctgcgtcaatttactgggggttgcgccgaataacgctttgcaaagctcggtcttacctgcacccgccagcccggcaatgcctaggatctccccttgatgcagggttaaagagacgtcacgcagtttatggcgatcgtgcaacccctctacccgcagcaacgggcgcgagccgtgcggtgggcggggggccggaaagatatcgtccagcgaatggcccagcattttttcgacgatctgctcaccgctcaggccctgcatgctgccttcaccggcatgacgaccgtcgcgcagcaccgtcaaatggtcgcagacggttttcaattcgtggatgcggtgggaaataaacacgatgccgataccttcggcgcgcaggcggcgcacgatgtggaacaggcgttcgctctcattgctgtctagcggggccgtcggctcatcaagcaccagaaaacggcagcggtgggatagcgcccgggccagcagcacctgctgtttctccgccaacgtacaggcttccaggcgttggcgtgggttgatattcagcccaagctgctgcaacagcgcggcggcctggcgatgcaactgccgccagttcagcagatggcccggctgattgagccagtccagcatgatgttttccgcgacggacagcgtggggatcagcgccacatccacctcctgctgcaccacctggatcccgtgctggcgggcctgcagcggcgaatgaatatcgaccttttggccgtcgataaaaatttcaccctggtaatggttatgtgcgccagagagaatgcccatcagcgtggatttacccgcgccgttggcccccaccaacgcatgggtcgaaccgccttgcagcgtaaaatcgacgttttgcagtgcgttgaacccggcaaaggcgatggagatattacgcatctccaggcgtgaagcggtgttggtcggcatagtttggctgaagacgttgcgcccctcgtgtttcaaatcgcggcgtggtggcggcaacgtgaaattcatttggatgtatagacggctaaagaaactcttttgtaacacgaattgccatttttgcaacatgcaaaatgcgcttaacccgataaaagcggcttggcggggggatcagaaccctaagcgatcgcgcagggcatagtaggcggcccctagcgcggtaaatggcggccaccgaagaacggcaaatggggaagttgggcgaaagcatcaaagcgttccgcgtcgccgcgcagcacttcggcaatcagtttgcctgccagatgcgtcaaggtcacgccgtggccgctgtcgccttgcaggtagtaaacgttattttccaggcggccaaactgcggcatgcgcgacagggtcagcaggaaattgccggtccagcggtaatcgatgcgtaccttcttcaactgcgggaaggttttgagcatcaagggccggatcctggcctcgatatccgccggatcctgtgcgccatagactacgcccccgccgtataacaaacggttgtctgccgtcagacggaagtaatccagcagatagttgcagtcttcaacgcagtaattatccggcagcagggaaagggccatatccgcagataaaggctcggtggtgatgatttgtgacccgcaaggcatgctcagacggctgaggcggggttccagcttttcccccagatacgcgttgcctgccaggatcactagattggcgctgacggagccaagagcagtgtgtagcttggcgggttgaccataatcgatatgagtgaccgccgattgttcaaacagccgtccaccatggcggcggaccgcctcggcctcacctagcgccagatttaacggatgcaaatgaccaccgtgacgatccagcagcccgccgacatagcgttcgctggcaacggtgcggcgcatggtttccccgtccagcagttccagttgcgggtggccataacgctgccaatgcgccattttctctgttaacgcgttgaattgtttggtcgttaaggcggcagaaaccgcgccggggcgatagtcacaggcgatggcgtagcgatcgattcgctggcgaatgatctccgcaccttcaaacatcatgctgccgagcattgccgcggtctgctggccgtagcgagcctcaatcacatcgatatcgcggctgtaggagttgaccacctgcccaccgttgcgcccactggctccccaaccgatgcgggcggcttccagcactaccacatcgtaaccggcctcgatcaggtgcagggcgctggaaagtccgctaaaaccgccaccgacgatacagacatcgcagcggatagcctcgttcaactggggataaggagcgtgggggttagcgctggcggcataatagctggcaacatgttccatcatcactcctccggcggatcttgtcagaaggtggttggggtgtgtgcgctgacgatcttgcaaacgcgcgttgaggtattgctgaagctgtggggcatgccggtgttgatggcatagctctggccagcggtcagcagataggtctggccgttgaccgtcagcataatctccccttccagcagcgtgccgatctcttcgccctgatgtttgatcttctcaccggtggtggtgcccggttgataggtctccagcatcatggccaggctgcgggtagggctgccgttatgcaccagcttcatcgaaacgccctggctgccgatctcgatcagatcgtccggctcgatcaccactttgggttcatctggccgttcaggttcagcaaaaaattcagacagcgatagcccatagaccttcagcagtttctgtaacgtactaattgcagggctgactttgtcctgctcaatggtgctgatggcgctgtgggttaatccggacagttcggcgaccctgcgctgtgacaaacccaagtgctgacggatctgcgacaggcgcttgcctggtgccaagctgacttcgctcatagcggtagttccttctgataggagcgacaggttgggatcacacccggagccgggtacctgtctgagtgatatcgaaaccacatgatatcggtagttgggcggtcgttgtaaaatatattgcccatgtttccccctggtctggcggaagaaattctgtaccaacaaagcgaaaacaacgccttttcggtcaatattttatcaatttagcagtcactggcgaataatcaaacgccattgtaacatttgcaaaccatttatgttaaagctatgtttcatgttatgggtgttattttgagcgtcagcctgtggcgcactctatagagaaaacaaaccatgtgttaagtcaatcggcaagcggatgcgaaggcattcccaagagcacaacggcaggtgatgtatgcaaaccaatagcgcagtagtagaagattttgcacagcataatgaagaaaggcgaagtagcgcgttccaaagtgaggttgctcactatttggaacgccatcctgccacgcagtatatcgatatccttctcaccgatctcaatggttccttccgcggtaaacgcattcccgtctccgggttgaaaaaagttgaaaaaggctgctatttccccgcctcggtgttcgctatggacattttgggcaacgtggtcgaagaggccggattgggccaggagctgggcgaaccggatcggatctgcatgcctgtgcccggtacgctgacgccgtcggcggcagatccgcaacacattggtcaggtattgctgaccatgctggatgaagatggtactccctttgacgttgaaccccgcaatgtactgaaccgaatatggcaggcgttgcgccagcgcggactgttcccggtggtagcggtagagttggagttttatctcatcgatcgacagcgagactcggccggttatctgcaaccgccgtgcgcgccgggcactcaggagcgtaacgtacagagccaggtctattcgctggataacctcaaccatttttcaggggtgctcaacgacatcgacacgttggcacagatgcaagggctaccggcggatggtgcggtggctgaagcttcccccggccagttcgaagtaaacctgaatcacaccgacaacgtgctgcaagcctgcgatcatgcgctggcgctgaagcggctggtgcgtcagggggccgaacatcaccatatgcatgccacctttatggcgaaaccttatgaggaatacgcggggagtggcatgcacgtccatctcagcgtggtagacagcgcggggaaaaacctgtttgccgaagcggatggcgaagactcggcgctgcttgagcgaacattagccgggatgatcgccttgatgcccgcatcgatggcggtgctggcacccaacgtcaatgcgttccgccgtttccagccggggatgtacgtgccgatccaggcgtcctggggccataacaaccgtaccgtggcgttgcgtattccctgtggtgatgcacaaaaccaccgcgtggagtaccgagtggccggtgccgatgccaacccttatctggtggtggcgactatcctggcggggatgctgtacgggctagacaccgaattgccgctgcctgagccggtgaccggcaacggtttggagcaggaggggttaccgttcccgatccgccaaagcgatgccctgtacgaattcgagcatcagcacgaactgaaacactacctcggtgaacgcttttcacgggtttatcacgcctgcaaaatgggtgagctgatgcagtttgagagattggtgacggaaaccgagattgactggatgctgaaaaatgcctgatatcaggcaccctgatggcgagcaagggcgtttttcctgatattaagcaaaagaatttgtattagaaggtttcaggatcttgtctttctgtgatcttatggcaaaatacgcgaaatgcagatagccgacgtttttaacgcgtcggttatttttttttgcattatgttttaccaacgtgcgtttcatacaccaagcgaggccggacatcgagccggatagataaataggttcgtcgcgatcaaccaaaactttatggtcgtgactcatgaggataagaaagatggggcaatttttcaccttggcaccggtgcccgccggtttccgttgcggtcgcagcgattatggagcaacacaggcttttgtgcctagttatccagcttccctcatcccccttttagaattcagtcgcacgttgcgaagtttccccgcaaccttgagtcttggcgtgtctattatccgcaagactgaaggtaagggggggctacgcgatgtccgataacatcatcaccgccgcaccagctgccggccaacgcgcccaactgcgtaaaacactgactttagtcccggtcgtcatgatgggtctggcctatttgcagcccatgaccatctttgacaccttcggcatcgtctccggcctgaccgacggtcacgtcgcgaccgcgtacgcctttgctctgctggcgatcctgtttaccgccctgagctatggcaaactggtgaagaaattcccttctgccggttctgcctatacttatgcccagaaagccatcagcccgcacgtcggctttatggtgggttggtcatcgctgctggactacttgttcatgccgatgatcaacatcctgttggcaaaaatttacctggaagccattttccctggtgtgccttcgtggatcttcgttgcggccctggtcggcctgatgacggcgttcaacctgcgtggcatcaagctggtggccaacctgaactccattatcgtggtggtacaggtggcaatcatgatcgtgttcctgggcctggtgattaacggtatctctcacggtgagggggctggtacgctggtgagcagccgtccgttctggtctgacaacgcgcacgtggtgccgatgatcaccggcgcgaccattctgtgcttctcgttcctcggctttgacggcatcagctcgttatccgaagaaaccaaagatgcagaaaacgtgatcccgaaagccatcttcctgacggccttgatcggcggcgtgatctttatcgtggtgtcgtacttcgtgcagttgtacttcccggatatctcgcgctttaaagatcctgacgcatcacagccggaaatcatgctgtatgtggctggcaagttcttccagtcggtgatcctggtgttctcgtgcgtaaccgtactggcttccggtatggcatctcacgcgggtgtttcacgtctgatgtacgttatgggccgtgatggcgtattcccggagcgtttcttcggttatgtgcatccaaaatggcgtactccggcgctgaacgtgctgctggttggtgcgatagcgttgtctgccgtttcgttcgatttggttacggctacggcactgatcaactttggcgcactgatcgcgtttaccttcgttaacctgtcggtgatatcgcagttctacattcgcgagaaacgcaatcgtacgctgaaagacaccttcaactccctgatcctgccggtaatgggggcgttgaccgtcggtgcattgtgggtcaacctggaagtcagttcgatgacgctaggcctggtctgggcggcgattggtctgctgtatctgacgtttgtcacccgcagcttcagcctgccggtgccacaagcaagcgaagacgtggcttaatcaacttacctgcctcgcgatagcaaaaagggttccacatgttggaaccctttttattactaacgaatcttatccgactcgctgtgtaggggcgccgcatgctgcgcccgttaatcaatggaaaagcacagggctatcccaccaactgtttgccgtaatcaaacagcgccttcagcaacgccatcttctctttatccccttcgtgcaggttgtacagcgactccaactgcaagatatagctctgcacccgttcagcactcagcacctcttggcggtgctgcaaccagcggcgctgctcggcgtcgtccagcgtattggggtagttacgggcccggaagcggaacagcagctctttcatccggccatcgctgaaggtcaaatccagcgcgggtagattctgcggtttggtttgctgaatgatcctcatcgccgctttgtcggcatcgctgaagaaaccgtcgtacagtttggcatccacatcatcgttcggggtgaaaggagcggcttcggcaaatatggctaccactttttcacggatctccgggtgctggcgcagcaccttcagattctccagacacgcctgacgatcaatgcctagcctgtctgcgttttctggcagcaacgtcttggccggagccagcaccgggcatttattgatatgcaccagcttgatcggcactggggcctgatcggctgccaattgatcgcggcgggtgtagaggcgttcacgcagctcgtcggcattcagctccagcagcggggtaatatcccctgccagatcgcacataatcaccgcatttttattgtctgggtgccaggccagcggtgaaacccaactggtgttacccctggccgcgccaaacatgccggatacgtgcattaatggcgtcatttccgcgacgtcgatcagcgcattgagcttgtgtttgttgcgatgctgcaacaggtagtcaaataaccttggctgcgcctgtttgaccagcttggccatggcgatggtggcatggacatcggacattgcatcgtgagcgtgctcgtgttcaacgccgttggcacgcgtcagatgttccagacggaagctggggaagccatcttcattttctggccagatgatgccttccgggcgtagggcgtagcaggcacgcatcacgtctagcaggtcccagcgcgaattgccgttttgccagctataggcgtaagggtcgtagaagctgcggtaaaagatgttgcggctgacttcatcgtcaaagcggatattgttgtaacccagaatacaggtgccagggacgctgaacgcttcatgaatacggcgggcaaactcggcttcgttaacgcctttggccagcgccaactgaggcgtgatgccggtgatcatcaccgcttcggggtcgggcaggtagtcatcggctggcgcacagtaaaacacctgcggttcttcgataatgttgaaatccatatcggtacgcaccccggcaaactgcgccgggcggtccattgacgggcttttgccgaaggtttcgtaatcgtgtatgtagaatgtggccggtgccttgctgctcaaaatcgcatctcttgttggcgtagggaatagccctattgtaacggcgcgatcaccgatgccaagtattggttaatgcttaacgttaaattgagtggcgctgcgcagtgcgatagaagttcagccgttgctgaaagtagccgcgtagatgcgtggggacgtgcgtctcggcgctttcccactcggaggcgtagccgtagcgctcgctataaatgattcttagtgccagcaaatcggtttggatcctttcacgttcttgctggggtaggccatccaatggtagtggcatgtctttctcccttttcgatagcgcataatatggggctaaagagaatttgtcgctacctcattcagggcataaccttcacagcgcctgtgccagagtgaggtggtgctttactggcttggtgctcatcgcctgttcttgttggccatgatcgtgctgatgatccagggatttagcataggtatagagaccgctaatcagggctagccagaatagcgtgcaaacggttaatacagccagccagaccttttggttgtagctcatgatagctcctgaacaaatgcatgggattaatctcattaattaaatcagagacaacataaatgttatttaaacgagcgaaataaaaggtgagtctacttgttaccaatcccccaataaatgtttctgagttttcttaagataatattaagaagatgaatttagcattcagtgcgtttctatttaatattggtttataaatataggcatacactcaactccattcaatgccaatgtgggtttcaaagatgaaaacgttactgttgactggggcgaccggcttcctcggtggtgcggtgctcgaaaaattattgattgaaaatcaaaaagttaactatcttctcctagtgcgtgcggaaactgaggagcaggggttagagcgtatttacactaatatggaaaagttcaatctagataaaaatattctgaataaactgacagtagagaatattttactgggtgacttaagtgagcccgagtgttttttgtctgacgctcgtattaacagcgtaactcatgttgttaactgtgccgcggtcgcgtcatttggtaataacccacttatttggaaggttaacgttgaaggcacgctggcatttgcacagcgaatggctcaggtggttggattaaaacgttttctgcatgtgggcacggcaatgtcttgtgcacctcaggtgggctcgctggtggcagaaagcgccgagtttgaagaaaccgccgaacatttggtggaatatacccgctccaaatcgaccatcgagcaactgatgcggcaaacctgtccgcagctgccgctggtgattgcccggccctcgattgtagtggggcatacgcagctgggttgcaaaccctccagcagtattttctgggtgttcagtatggcgttgatgctgcgtaagtttatgtgttcgctgcaagatagcatcgatgtgatcccggtggactattgcgccgatgcgttagtgctgctgctcaaccgcgagagcttggataacgatgtttaccatatctcggcgggggaggagagcagcgtcagttttgcggatatcgattatgccatcgccgccgcactagaggagccaccggtgggcgatcgctatgcgcaggtcagctacgaagccctgttgcaaatgcgcaaacagttgaaggatatcttcgggccgtgcaatgagcgcctgatgttgaaagcgatgcgtctgtacggctcctttgccatgctgaacgtgcgctttagcaacgaaaaaatcctcaagctgggcatgcctaagccgccacgctttactgattatattggccgctgcgtgcaatcgacccgtgggttgtcgataccgcagcaaatggcggtggattttaaatagcggctgagtggttggtacgcaggggcgccgcatgctgcgcccgcttccaggatcttaccaggaggaggatgaccagaatacccggcccagcaccaccaactgctctttgcgctgtggatagctgagccgttcatcctggtactcttcccgattcaaagagcggatgaccacgccaccgtcgggctgctcaatcaggatcttgacccgtaacagattgccgtggcggatggcataggttttcccttcgcggatgcgggtatcgacggtattgatgcccaccacgtcgccatcctgcaatcggggttccatgctggaacctgagatgcggataatgcgtgccgcgttcaccggtacccccatcttgtgcagatagtagcggcggaagatcagcgaaaactcttcgctatcgacaatttcgtagcagccgtcaccagcggagaaatcgatatccagcaatgggatctccacaaactcttccttgtcctgctcggtatcttcccataccacgggtttgagccgtgccggttggaaatccgattcggccgccacgttggcaaacggctgttccagcgccttctcatggaatacatcgaaccagcctttgggcaagccgagtttggcctcgatgcgtctggcgaggttgtcgcccaggttgcgggaggatttttcaccggtgatctggctcagcgttggcgcagaagatcccaccagtagagcaaactcattctggttggtgccttgccgggcgaaacgtgccatcagatcgcgcaggttgttgcgcctgatttctttggtttccatgcgccgatgatctcactctttagcaaaaaggtaaatccttcgccgctaaaatctttagcgtcaacctaaacccattcctaatcaggaaacatctttcaacagcttgtgttgtacgtcagccgcaatgttccactaaaataagggttttacagcaaggttggtggggacaagcgtgcgtctggatagaaaaatctcttcttttgaacatctgatctaccgtaattaccgtatcgtccacggggtacggatcgggttggcctttatcctgacctttctgttgatccgtttgctggcggtaccggaaggtacctggccgttgatcacgctgatcgtcgtgatggggccgatctctttttggggtaacgtgctgcaacgggcgctggaacgtattgccggtacggtgtttggtgcggcttctggcctgattgcgctatacctggagctgtattcactgccggtgatgctggcctggtgcggggtggtgatgtttgcctgcggctatctgacgctgggcaaacggccctatatggcgttgctggtgggcattacgctggcagtggtcatcggtgctggggccggcgatatatctatcgcactgtggcgcagtggcgatgtgatttttggttcgttgctggcgctgttgtttaccagcatctacccgcagcgggcttatgtgctgtggcgaatgaaaatggcggattgcctggagacggtagggaagatctacggcgcttacctttcacccaacatgattgagcggccccggctggagcctaggctcaaaaacttgctgggcgatgtggtgaagctacgcacactgatcccccccgccagcaaagagactcatatcgccaaaccggtctttgaagcggtacagaccctgagccgcaatctggtttgcacgttggagctgttagccgatgcttactgggcctcgcgtgaaacccattttattatgctcaatgccaaaaccttgcgtagttcacagttgttgacgcagcgcgctatcgaatcgctggcgaatattatgcgagatggtgagcccctgcatgcgcaggtcattgccggggaactgagcgatatctccgctgagctgaagacattaatgcaagaggccagtgctgctcaactcagcgaagcccctatctatggctatgtctggctgagcatggaactggcgcagcagttggaagagttgggcgatctgctcaaggtctgtacggccaatactcaggaatagtggatcagatcatgaagcaggtgcatcaggatagggtcaatgcgctaaagtgggtaagataaggcaatgacagttgtgtctgacggccacaaccctgtatcttggtatcattgtggccgtaagcaaatgaatctgtgtattactaaagcaagggtatgaagatggataatgcaaataagccgagtttccaggacgttctggagtttgtgcgtatgttccgccgtaaaaacaagctacagcgtgaaatcgtcgacaacgaaaagaaaattcgtgacaaccagaagcgtgtgctgctgctcgacaacctgagcgagtacatcaagccgggcatgagcattgaagacattcagggcatcatcgccaacatgcgcggtgactatgaagatcgcgttgatgattacatcatcaaaaatgccgatctgtcgaaagaacgtcgcgatctgtccaaaaagctgaaagcgatgggcgaagtgaagtaattcgcgtcaaacagggctggggatctcccggccctgcatcttttcaggggtgcagcgccctgaacgaccttaaagaataacgatatgttaccgtgctatagcaaatctgcttaaagccgctacgctaatgttataaatagactttgcccaatcgatttcaagccgtcgcttgaaggatgacgggtataaatttcttcgccagcagaggctgtcatcgatggcagaaccgcaactcagcacctttctcaacctggacgagacgcttcatcctccccgtatcttggcatctggggattgggtgttggcacattatcgcctgttggaacccgccgttgggcaactgcaaacccgcttgccggcggatgtggtgttcgatctcagccaactgggcagcctggatacggcaggtgccaccttgctggtcaatctgctgggtgaccaacggatatccgatctcaaacagttagcccccacgctccctgtggaacgccgcgtgctgctggaaaccgttggccgtgccttgcaaggatttacgccaccaccggcagaaaagccgcccggtctggcaatcgaactgctggccaacgtcggccggtcgatggagagtttctggcacaacctggtagccctgctggggtttatcggcctgacgttgcaaaccctgtttgccaatctgctacgccctacgcgctggaggctcacctcgctggtggccaatctccagcaaatcggtctgaacgcggtgccgatcattatgctgctgaccttcctggtaggtgcagtcatcgctttcctggggtcaaccgtcctgtctaccttcggtgccagcatttttaccgtgcaactggtggtgttttccttcctgcgagagttcgcagtgttgctgacggccatcttgatggcgggtcgtaccgccagcgcctttaccgcagaactcgggctgatgaaggccaatgaggaaatagatgctattcaggcgatggggctgaacccggttgaactgctggtgctgccgcgcgtgctggcgttgctcctggcgttgccgatgctgaccttcatcggcatgattagcggcatctttggcggcatggtcgtctgcgccttgacgctggatatctcaccgaccatgtttttaaccatcatgcagagcagtggcggttttcagaacttcctggtggggatgagcaaggcgccggtatttgcgttcctgatcgccattatcggctgtcttgaagggtttaaagtcagcggtagcgccgagtcggtaggggcacataccaccgccagcgtcgtgcactcaatctttgtggtgatcctgctggatgcggtcgctgcactgttcttcatggagatgggcgtgtgagccagacgaccccggaagccattattcgcatccgtaaattgcgaaactgttttggcacccaatgcgtgcatgtggacctcgatctggacgtgcgccgaggagagatcctgggcgtggtaggcggttcgggcactggcaaatccgtgctgttgcgcagcatcgttggtctacgccgtccaaccgccggccagatccacgtctttggcgaggatctgatggagctttctggtacgcgccgctccgtgctggaaaggcgatttggcgtgctgtttcagcgcggtgccttgttcagctcactgacggtgaccgaaaacgtggcgttgccgctgattgaatacgcaggcttaccgcgccgagatgccgagcaattggcacaggtgaagttggcgctggccgggctgcctgccagtgccggcaacaagtatccggcctcactttctggtggcatggtcaagcgtgccgcgttagcccgagcgctggcgttggatccggaaatcgtatttctggatgagccaacggctgggctggatcccatcggcgctgccgcctttgacagcctgatccgtacgctgcgtgatgccttggggttaacggtgtttttggttacccacgatctcgatacgctttatacaatctgtgaccgggttgcggtactttcgcagaagaaggtgctggtggtggatacgctagaggtggtagccgctactgacgatgcctggatccaagaatatttccacggcccgcgtgggcgggcggcacagcaggccgtaacgaatatcccagagaggcaataacaaatggaaacccgtgcgcatcatgtcttgattggtttatttacgctgattattttcaccgccgtgctgctgttcagcctgtggctgaccaagtccggcaccgatcgccagttcaagcagtacgatatcgtgttcaatgaagccgttagcggcctatcacagggcagcacggtcaattacagtgggatccgcgtgggcgaagtcactcagctgcgattggatcccaacgtgccgaccaaagtctgggcgcgtattcgggtcacggcctctgcaccgatccgccaggacacccaggctcgcctggcgatagctggtattaccggtacgtccaatatccagctcagcggtggcagtgaaaccagcccgttgctgaagggagaggatggggcaatcccggtgattatcgccacgccatcgccgttgactcagttgcttgccaatggcgaagatgtgatgactaatgtcaacgaggtgctggtacgcctgaatcaactgatgacgccggataatcagcaacggttggtgaatacgttggataatctggaacagattaccaataccgtggcggggcagcgtgaagatatccgcaccatcttgcagcaactggcgttggtgaccaagcaaagcaacgatacgctggcgcaaaccaatcggctggtgcgtaatgctaacgtgctgctggacgggcagggcaagcaactggtcgccaatgcggctaataccatggcatcgcttgaaaaaaccaccgcgctgctcaacaagctgattggcgaaaatcagcagtcactgaatagtggcatccggggattcaacgatcttggcccggcggtagatgaattacgcagaaccttattgaccttacgcggtgccatgagccgcctggaagagaacccgtccgccttgctcaggggccgcgaacgtaccaaggagtttacccctaaatgattaagctaaaacttcgccagacgctacggttgttggtgctggtagccgtgatgccgctggccgcctgcactattttgccggaaagcccgatacagcaggtgtatttgctgccagctcagccagtggccgtggcagggggccaggcgtctgaacgctcggtacgtatcgtgcagcccaataccagccagttcttgaacggtacgcgtattgctgtgcagcctcagggcgcggagatcacctcttttagcggttcgcgctggagcgatccggccccgctgttgttgcgtaatcgcctgatccaggagttccgcactaacggccatttccgctcggtgagcagcgacgatgacaatttacaggcggatcttgagctaggcggcgatttatcctccttccaaggggtctataacggagatcggggcgaagtggtgatccgctttgatgctcgcctggtacgcacctccgatcgccgagtgatggccagccgtagttttgcggttcgcgagccgatccacggtacatcgatggacaacgtcgtgcaggcctttggcctggccagcgataagctggcagcgcagacgctggcatgggcgcgccagcaggcggctaattaagactcgtcggccatggcctttaaccactggataaaggcgttgattttaggccattgccggtccgagagcgtggaaatgtagtagcgctgtgcgcattgcatttccatgccggggaagggcgcgataagttcgttattctccaggcgcttactcaccaacttcttgcggcccatggcaattcccacgtggttcatggccgcgatcactgccagatccgaacgatcaaaccccataccgcgctggccttcggcaaattccagatcaaagtgtttggcccaggtattccactccccgatgtccgagtcgtaactccatgcctgacgatcgtgcaataacgtgcaacgccgcaggttggcggggttacccactagctcatggcgttcggcgtactccgggctgcatacgggcacgatcgactcatccatcaaatgctggcaatcgagtttctccggcgttttgtcatcaaaatagatcgccagatcgatccccgcaccgtggaagttcaccatctcgttgccggtgagaatattcaggctgatggccggatattggcgatcgaagtccgccagcttgggcaccagccagcattgggcaatcgacgggcgtgagtagatggtcagagtgccggacagctcctggcttttaatctccagtatttcctgattgagatagctgagtgacgatttcaacacccagaacaaccgctcgccctcgggggtcagttcgatccggcggtgaaagcgctggaatagcttaaaacccagctcggcttccaggttgttgatccgatggctgacggcgctgggggtgattgccaactcttcggcggccagcacgaacgaaccttgccgcgcggcaatctcaaacgtatgcagcttggctagctgatagccattcaggtgcctgttgcgggcgagttggtgcttgtcgtcgtacatggttatcgcctgtgaaataaaccagattatatcgaaaccggagacttaaagatgaagcaatgtgagtcaaagacagaaatagtgtcaaatgttgaccgaaatcaccttattgattgaatctggctcatgtgaagaggcgttttgatcgtttgtcagcgctggggcgttagtttccaataggagtgaaatttatcctggaaggacgctgaacatggactcgcagatctgggtagtcgctacgttattaagcagcatcattatcattattctcactatcgtaaaattcaagatccacccgttcctggcgctgttgctggccagtttttatgtgggggccctgatgggcatgaacccgctggaaatggtcaatgctattgaaggcggcatcggcgggaccttgggcttcctggcggcggtgattggtttaggtaccattctgggcaacatgatggaagtgtccggggcggcagaacgcattggcatcaccttgcaaaagtgccgttggctgtcggctgacgtgatcatggtgctggtggggctggtctgcggtattacgctgtttgttgaagtgggcgtggtgttgctgatcccgctggcgttctcaattgccaaaaaaaccaatacctccttgctgaagttggcgatcccgctgtgtaccgcattgatggctgtgcactgtgtggttcctccgcatccggcggcgctgtttgtcaccaacaagctgggtgccgatgtgggctcggtgattgtttatggcctgattgtcgggttggccgcctcgctgatcggtgggccactgttcctcaagttggtcggtaagcgtctgccgttcaaacccgtacccgccgagttttcctccgtgcaggtgcgcaacgagcaggacttgccttcgttgggtgccacactgtttaccgtgctattgccgatcattctgatgttggtgaaaaccgcagcggaactctatatggccaaagacagtgcgctgtataccttcctggagtttatcggcaacccgatcaccgccatgtttatcgccgccttcgtggcctactacgtgctggggattcgccgcaacatgggcatgggcaccttgttgaccaaaacggaaaacggcttctcttccatcgccaacatcttgctgattatcggggccggcggtgcattcaacggcatattaaaagccagtgggctggcagatacgctggccgtgatcctgtcgaatatggacatgcatccgatcttgctggcctggctggtggctatctgcctgcatgcggctgtggggtcggccaccgtggcgatgatgggggcgacggcgattgttgctcccgtgctgccgcattaccctggcgtcagcccggagatcatcgcgttggctatcggctctggtgccatcggttgcaccattgtcaccgactcgctgttctggttggttaaacaatactgcggcgcgacgctcagcgagatgtttaagtattatacctcggccacctttattgcttcgctgattgcgctgggaaccacattcctgctttcttatatcatctagaccaaaagagactatttatgaatacgttagacattgaaaacctggtagtgaaatttcctttggtgcaacggctgatggatttggaagcggtgacctggttcaaccccaatacgaccacgctggcggaagggttaccgtacgtcgggctgacgcaaaatgatgtcgccgaagccgaagcgcgcttgcaacgctttgctccgtatctgtgcctggcattccctgaaacgcagcaaacgaatggcattatcgagtctgaggtagtggcgatcccggctatgcagggcgcgctggagcagcgttatgagcaggccatcgcgggtaaaatgtggttgaaaaaggacagccatttaccgatttctggctccatcaaggcccgtggcggcatctatgaagtgctgacccacgcggaaaagctggccatcgaggcgggcatgctgacggtagacgacgattacagcatcctgtttagcgacaagttccggcagttcttcagccagtacagcattgccgtgggctcaaccggcaacctggggatgtcgattggcatcatgagcgccaagctggggttcagcgtgagcgtgcatatgtctgccgatgctcgcgcctggaaaaagcgtaaactgcgcgagcacggcgttaacgtggtggaatacgagcaggattacggcgtggcggtggctcaggggcgcaagcaggcagagtccgatccgcgctgtttctttatcgatgatgaaaattcgcaaaccctgttcctcggctatgcggtggccggtgggcgtctgaaaaagcagtttgcacagatgaacatccaggttgatcaggaccatccgttatttgtctatttgccctgtggcgttggcggcgggcctggcggagtggcgtttggcctaaaactggcgtttggtgaccatgtgcactgcatctttgccgagccgacgcactcaccttgcatgctgcttgggatccacaccgggctgcacgatcacattgcggtgcaggacctggggattgataacgtcacggcggcggatggtttggccgttggccgggcctccgggttcgtcgggcgtgccatggaacgcctgctggatggtttctacaccctgagcgatcaggagatgtacgacctgcttggtttgctcgccgctgttgagggcattcagctggagccttctgcgttggctggcatggcggggccagctcgagtttgcgccgaccctcaatatctggacagccatcagatcgatgcccaacggatcgctaatgcgacgcatttggtttgggcaaccggtggcggtatggtgcctgaggaagagatggccaagtacctcgcagccgcacgctagcgctgacaaaaccacgctttacgggaggggggcgctgcacatgctgcgcccatttagcgattccccaccgggcaaaacatcacagcgtgaagcgatcgcgaaactgtgccagtgcttcgctgctgtccccggaggcccagccttcgagtgctaccactccttggtaattaatctcctgcagcgttctggcaatggcgcgatagttgatttccccggtcccaggctgcatacgcccaggcacatccgccacctggatctcgccaatctgtgtgccacagcggcggatcagttcaatcaggttgccctcaccgatttgtgcatgatagaggtcaaggttcatcttaagcgctgggctattgaccgtctctaccaatgccagtgtgtcagctgcgcgggcaaaaggcgtgccgggatgatcaaccgtcaggttcaagttctccagggtgaagatacgcccagcccgttcaccgagttgtgctaaacaacgaagcgtatcggcagccttcagccacatgttacccgtcaccctctcaaccggttttaccggtaagccctgtggatccaggccggtaccgtgcaggttcagacaggggcagttcaaccgttcggctatcatcagggaggcttctgcactttgcagcaactgcgcgatctcttgctcatcggttagattgccgctgagataaccggtcattgaagtgaaacgagctcctgtcgccaccagtgcatcgatatccttattggcccagctccagatttcaacaccaaagcccagtgcatgaatgcgcttcacacgttcgataaagggtaagtccaaaaacaccatttctgcacaaactgagagttggtagcttgccactagcggtctcctaatttatagggggtatctacaattggtcatcaatatacatgcctaagttgttttttaatgtcaaaaaaagataatttcaacttggtcataaatttaggggaaaattaatttgtttacattgtagagttattggaggacattcgctgtacttatttaatcaggccgtaatttatgtattcgagaaggcgttttctaaccgtaggcgctgccctgacgggctttgctgtattcaaaccttccttatcctggggaagaatgcctagtgaaagcagcgacgctgccatttttattaagctttcagtgctattaaccaacggaaaaaaaatgaacccggtaatagcactgcgtgccttgaattgtttgcaggaagaggatccttcctttcaggagaaaatgcagttgctggccaatgcgctgagcgttgccaatattctctcggccgatgagctgaataatcatttgattatgactggtcccactggcgacaccgccaagaaaatcatttcagcctggtatcttggttatacaggaacacccgtatcgctacgggcgtcagataacacgcgtttcgtcagctataccgatgcctttgcctatgctccaactttggacgcgacagtgatccccacttattcccgtggcaagacaaactattgggtgcagccacctataaccctcaacagcgactagttcccgttgaaaataggagcaatatcatgagtaaacactatgatgccgatgtgattgtcattggctctggcgcattgggtagtaatgccgcaaccttgctggcccgcagtggcaaggcggttattattcttgaggctggagagaaaataccgcgctggaagatcgtcgaaaacttcagaaactcatcgaaaaaatccaattataactccccctatcccaacgaaccttgggcccatcactcctatgatgaacaatatatcgagaataccggttcctttgatttccggcccggcatgctgaaacttgtgggggggacaacctggcattgggcggccgcctgctggcgctatctgcctagtgatatgaagctaaaaacattgtatggcgtggggcgtgattggccgctggaatatcacgagttggagcctttctaccaccaggccgaggtggctttgggggtttgcggcagtgataccgacgatcagagtgggcagggcggcagcgcttttcctccgcgttcacagccgtatccgatgttacctgaaggtgaaacctacctattccagcggctgaaaagccgaatggctccggctggttatcatttcatccatgaacccaatgggcgggctactcgcccgtatgatggtcgccccgcctgcagcggcaataataactgtatgccggtatgcccgattggagccatgtacagcggtgatcaacatgcccaacatgcgcaagatgccggggcgcgtttattgacggattcaaccgtgtggaaactggaaaaaggcgttgatgacaaaattgtcgcagctcatgtgcgcagttctaaaggtgtcgatacgcggttaaccgcaaaatactttatcgttgccgcacacgggctggaaacggcaaaactgctgttaatgtcggatatcgccaacagctccgatcaggtggggcgtaatttaatggatcataccggcatgggcttgcagtttctggccgatgaacctctctggccggggcgaggcgccgtacagcaagggggaatattcaactctcgcgacggcgattttcgtaaaacaagagcggcaatcaagcacgctattgctaacaatgtccccaatatggccgtagcgcaacgtttgatagctaaaggcgtcataggtagcgaactggacaaacagatccgccatcaggcggcacgctgggtcgatatctcaacggtgtttgaaaccctcccccaggcaagcaataccgtgcgcccaagtaccacacgcaaagatgcattgggcattccgatgctgacggtgaattacgaagtcgatgattatgtcaaagcggcaaaatccgtggtggaggcggattacaaaagattcgtcgctctgatgaggggcaccgtcattaatgacaatacgggctggcaaaaccgtgaccatttaatggggaccgtcattatgggcgacaacccaaaagattcagtggtaaaccacgagtgccggtgctgggatcatagcaacctgtttctcgcgacgactggggtgatccccgcttcgggagtcgtcaatcccacgctgacgggcgtcgctctgagcattcgcgcagctgaaatcattgagcgtgagatttgaatatgaaaatacttttcaggtttctcgctgtaaccgtgttgtttattgggtttagccactctttggctgtatttgccgccgataaggcgttggttgagcgtgggagatatattgcgatcgctgctgattgcggtgcctgccatcgtcaggctctcaataatggcgttccgtttgctgggggatacgcgatcgagtcaccgatggggcgtatcattgccagtaatattaccccctcgaaacagtacggcatcggtaattatagcgagcagcagtttgccaaggctgtgcgtgagggtatcgccgctgatggcaagaatctctacccagctatgccatacacttcataccgagatatgacgacggcggatgtacaggcactttatgcctactttatgcagggggttgaacccgcagatattccgccttcagcacgtaccgatctgagtttcccgtttaatatccggcagattatgtggggctggaatctgttgtatctcagcggcgcttccgctgataaggcagaggcacatcctggttcattggagcgcggtaagtatttggttgaggtgttggcgcattgcagtgcctgccataccccacgcaatatcatgatggcagagcagagcagtcttaaccttgctggtagcccgctgggtggctggtacgcccctaatattaccccagataagagtggcattggcgattggagccaacgggatctggtcacctacctgaaaaccgggcatctggttggcaaggcacaggcggcaggtgcgatggcggaagccgttcaaaacagcttcagcttgatgacggatgatgatttgaatgcgatcgcttcatgggttaagcaggtgccagctattcctacggcggttgccgacattgggcttcaatcgccacgggttgggggtgatatcaacagcgttctcaccgggcagggaaccctgacagaccgctcaacaacggacggcgctaagctttatgaaaatgcttgcgcgagttgccatggccatgacggccagggaaccgatgataacttttatcccgcattaactcgcaaccgtgcggtttccgcattggggccgcagaatttggtgatggtcatcgtggaaggtatccaacgtaaaaccagtcattctgatatcagcatgcccacattttctgaccagttaaacaacgcgcaaattgcctcagtcagtaactatgttcgcagtcgttttgccggtattgacgacaaagtgactgcgcaggatgtacagacccttcgtgatggtggggagcctccgtttataatgcgatacataaactggctaatgaccgtagggatattggtgatggtaagtttgttgggcggcttctggtattggcgaaaaacaaggcgttcaggcagacagcaaattcgctgactcaatcggtgtcaccccttccaaaaggaaggggacgcgccaaatgacggaggtagtacaaaattaatcacagcgcccatggttgattttggtcaggggaaggttgatgtcgaatattttcagatgaatatttttagcccccatcgcttcagcccttttgacgtggtgttcggcatatgtttcggcaaacgctcggttttcgaaaaagtatatccctcccgcctcgccagtatgctcattctcagtccagatcttggagatgaaacccggctcttgattgatgctttcggccagcgattgcgcatttttggacagggttgcaccaagctggtcggctgggaaactaaaatcaatctgtaaaatgacactcatgtcgtgatccttttcgtggcgagtggttgtatatgaaacaggggtattccatggtgcgttctgcaagctggggtaactgcgcgttgagaaaccgcccctttggttcattgtgacataaaggtttggctgaagtcgtcgacttgcaagccaacctggtcgctgaccctatggtaaaacgccttggttttgggcgcttcccccctggattggttgagaccgcgatcgtcatgatatttgacagcaaaaattaataaatagactatgaaagttaacactgttcaatatttgtgaacaaatggacaaacttgcagccatggccacttttgtcaacgtggttgaaaccgggagtttcacccgcgcggctattgccatgggacttcccaaagcgcggatctcccagcgtattagcgatcttgagtgcgtcaattaatcggggtgtaaagaggtggatggcgttgccgcacatccacccaataatcgaggatcagtgaacctttttaccatcaacaatgatgtgatgcgggctgcgagccttcggatggatgaagaaatgcccttcctgagcgctatccgtgctgattggcaccagcgtaatatttttcgctccagcggctttattatgcaaggcgtaaataatgaaggggattaccagcaccaccaggaagcacacgaccagtaaaccggcgtagacgtcgttagcttctccacccggcagccccgaaggagggaagaaggagacgacaaaggctaccagagaggtcagcaacccaatgaccgccactgtaattttaaccccattgcctcccggtatattaaaggtgcgcttgttattcggctgcttgcggatcagctggatatacgccaggaataacaggaaatagctgcaaagataaatcactaccgtcagcgccagcgcaatcaggaacgacatgttattgccccccccggtattggtcagaacaatcagtgccaccgaggtgatgagtaactgggaaatgaccagcaccaccggcacgccgtttttgttcattttggcaaagcgggcaggcaggatcccttgttgtgccgtcactaacatcccgcgggaaggcccgactatccaagcggcgatctcagccagcacccccagaagcaacagcgcagcgatgccacgaatagcccattcaaagcccgtccccaaatgattgatcagcaccgtgaaggtttgcatcacgcccgcagagaggttgatttgctcatggggtatcacggcggcaatcgagagcccgccgacagaactcaggcaaatcgccgcaaacatcaacagcagcatggcaagcggataatcgcggcccggatttttcatttcattgacgtgggtagcagatgcttccacccccatatagcttaggatgaaggccacaaacaccactaacgtgctcatgctggtgaagtccggcaagaaggtttcggcattcatttcaatcgcaatgggagcaccagagcgcagataagtgatggccaggatcaccagaatagcggcaggcagcagaataccggcaaaaaaaccaatcttggcgatgcgagcagtatttttggtgccactaaactgagtcaaggccaggccccataaaataaccagtgcggcgacggttttaactatcggatcgttattgagttcgggccagttaagaatataggacagcgcccctagcacgaagtagagcatcggaatgaagcctatcgcgatttgcaaatagccaaacgaaatagcggcaaacccccatttctcaccgagggttttagaaacccaggtaaacacgccgccctcctgccaaccctcgaccgtcgccatttcagcggcacacaatcctaccggaatgaaccacaacaagccgccaaggatcaggaagaaggtcagtgaaaagccagaggttgcaaacgttgggtattcgtaaaccgccattaccattgatgccgttatggcaaaaaagcccaacagcgtgagttgttttggcgcagctattatttgagtggtagccatggcaattctcctgggacaagcgaaggtgcttgccagttgatttcttatggttaacaggagtggcgaggagcaagccactccattaacaggtcagatgcggatcagccgtggttaaaaccggccgcttcatcttccgaaagtggattaacgaccggatgactttcgaaatgctcaagtgctcgtttcagatcgtcaagcaacagactacccaggtcaaaactcaccccgtggcgcactaaaatacgctggatcaccagatcttcccgattggctggcatggagtacgcaggtacctgccagccgcgcgagcgtaatttatcggcgaggtcatacagcgtgtagccaccgatattggcgccttctttcagtttccaggccagcgccgggatgcctttaccactgtcaccatcaaacaggatctcaaacggaccgagcttaccgatctcgtcggcaagatactgggccgtggcatagcaagcgttatggactttggtgtagccttcgcgaccaaggcgtaagaagttgtagtactgggcgatgatctgcccaccagggcgtgagaagttgagcgcaaaggtaggcatattgccgccaagatagttgacgttgaaaataagctcttcgggcaagtctgccgcttcacgccataccacccagcccgcccccagaggggccagcccaaacttgtggcctgaggtattgatggattttacgcggggcaggcggaaatcccattccagctcaggggcacagaatggggcaaggaaaccgccactagcaccgtcgacatggatgggaatgtccaggccggtctgctgctggagtttatcgagcgcgtcgctgaccgcttttaccggctcgtactggcaggtaaaggtcactccgagggtgggtactacaccgatggtattttcatcgactcgtttcagtacctcttcggggttcatgatcaggcgatcgccttccagagggatttctcgcaactctacatcgaaataacgcgcgaatttgtgccagcaaatttgcaccggcccgcagatcatattgggtttatcggttgatagaccctgtgcggcacgttttttgcgccattgccatttcaacgccaacccacccaacatagcggcttctgacgagccaatggtggagcagcccagcgtggtgcccggcgacggcgatttccacagatcggccaacatgcgcacgcagcgggcctcaatttcggccgtttgtggatactcgtctttatcaatcatatttttgtcgatggacagatccatcaggtcgcgaatttcttcatcaacccaggtctgacagaatgtcgccaggttttgccgtgagttaccgtctaacattaattcatcgcggatggcactaaatacgtggcgaggatttcgctctgcgtctggaaacccagatttcggtagtgaaatggctaagtcgatcgaagaataaacatcatcattaacattgctgttatttttctggttgctgttactcataaaagccctcttgatttctatatgtcaatatactcggcaggaccatgtaaaaccgccccctgtgctctactaacgccatcaagtcttggcgttaattctagaacattttctggaaaagataggaaatcatcttaaatatagaaattttccagtaaaatcagtggggaggaggcttttcttgttgggcgttttgccagtattttttaagcaagggggtggtgattcatagagctagtcgcactcggatttttatgacagtaatttaatcattgttacggcacggttataataacattaaatctgttaatgaggcttttctctttattgataaggtaattcccatattatccactgcaatctaatggtttattaatgagggcataaaattattgaaaaataaagcattgtgaggattacgttctacaattactctaaacaaaatctgcagttacccgcgaagtcggtttgatttgataaggagtgatgagttatgcagcaaaaaaccatgtttctgcctgcctgcgaacattctgaggcatgtctatgccacagcccggcatttatacgcattaatacggtgctaacccgccaggcggcgaaagcgccgccgataacgacagccacggtcgcagcagcaatacccgcagggcaatccacacattccaatacaaccgccagcgctacgcagctaaaagtgtttatcaacgtacgaatttttgacggggtttctgaccaactgcgcgaggggatgcaggttatcgttgaaggcaacaaaatccaatcgattgaacccgctgatacggctccgcctgcgcaagcaatagttatagacggcaacggtggcgtgctgatgcccggcctgattgatgcgcactggcatgccatcatggctcgcccttccatgatgacggcgatgacggccgattttaactatatccaagcgctggcgattgccgaagctcaggcaacgctgctgcgtgggttcaccacggtccgcgatatgggcgggcctgtgtttggtctgaagcgcgcgattgatgagcagattacggttggcccgcgcatttacccgtccggggcgttcatttcccagaccggcggccacggtgattttcgcatgctcagcgaagtccctcgcgcccccgcggactctctgagctatatcgagagggtggggataaccgccattgccgatggtgccgatcaggtgttgttacgcgccagggaacagctgatgaggggagcatcccagatcaaatttatggccggtggcggagtagcctcgctctatgacggcatcgacgtgacggaaggctccgtgcccgaaatccaggcggcggtgaccgctgctgaaaattggggtacctacgtgaccgttcacgcctacacggcccgcgctgtcaccatggcaatcaaaggcggcgtgaaatgtatcgaacacggccagttggtggatgaacagaccgtggagctcatggcgcaacagaatctgtggtggtgcctgcaacctttcctggacgatgaagatgccgtacctatggcgaatccggcctcacgcgccaagcaactggtgatgtccgctggaaccgataacgcctaccaactggcgaaaaagcaccacattaaaactgcctggggtaccgacacactcttcgacgcccggcttgccacacgtcaaggagcgcaacttgccaagctgatccgctggtatacgcctctcgaaattcttaaaatggctaccagcgttaatgctgaactttgcgcgctctccggcccacgtaacccttatcccgagaagcttggggtgatagaagcaggcgctctggccgatatgatcatcgtcgacggcgatccgctaacggatattcaactgctggcccagcctgaggacgcgttccagatgatcatgaagaacgggcaaatttataaaaatacgctggaaaacagcgcggtttagtacagcgccgcaatgcggttttgggagataaaatggcaagcgcacactcttttcgtcagcgccgggagcctttgttttttcgttcaggccatacgcgctatggagcgttggccttattgctggtcagtacctttagcctcatcgggtgtcgtgactttggtgcgccagcattttccttgctcggctcttatttccctgcctggttagcctgtgcagggattggccttatggtggcggtaggggctcgcattctgctgatttttgcgggaattgacgaagtcctgccgtggcgactcttcgtctatacctgcctggcgctcgccgtagcatttatgtcattgcttttattctaagtgcgctaaaaatgaacaggttaaaacaacagggcaataaacgtcggatagcgatcgtcatcggggtggttatcgttattgctgccgctatttcagggtggttgacgctgcgtcaaaactcgttaaatcccacgtcgcaagatacggtcatcggtgccagcgtggtgaacgtcagcagctccgttcctgggcgtatccagtcaattaacgtaacagaaaacggcaaggtccaacggggtgaggtgatgttcactctcgatccgacgatttaccgtttgcgggtcgagcaggcgcgggcggaactgcagatggcgcaagctgcctgggatacgcagcaccgcacgatgatcgcagaacaatctaacgcggcgatcaccgatgagcaggttaaccgggcgcgggccaaccttaagctggcaactcagacgctggcacgcattcagccgctgctgggcaagggctatgtcaccgcccagcaggttgatgatgcccagaccgccaaacacgatgcggaaatcagcctgaaacaggcgctgaagcaaaccgtcgcttcacaggcattaatcagcagcgctgcggagtctgaggccttgctcggcgcacgccgcgccgcattggccattgccgaacaagagttggaaaatacccagatacgagcaccgcacaatggcctggtggtggggcttaatgtttcggcgggggaatttgtgatgccggaccaggcggtatttacgctgattaatagcgaccactggcacgcctctgcttactttcgcgaaacagagctggcgcacatcaaaccgggggattgcgccacggtctatgttatggccgatcgccagcgtgcgattcagggcagagtggagggcattggctgggggatcagctccgaggagcagtttaacattccacgtaatctgccttatgtcccaaaatcgctgaactgggtgcgggtcgaacagcgtttcccggtgcggatcaaccttaaagatccgccggctgagttgatgcgcattggtgccagcgcggtggcaatcgtacgagacgaccatggttgctgacagcccttggggcagaatgctgcgccaggtgaagcgcgatttggcctatttccctggccgattggcgatggcctggcgggtcggtgcgctttgtgcgctgatgacgttggttgccatgctgtacggtatccccgaatcagcgattagctgctatctgattttgttcgtgatgaaaccagacgccgccgaaagtatggcgatggccattgcggtgaccctgctcgtttccgtggtggtggggctgatcttgctgattctgccttataccctggaatctgcgcctttacgcatggcggtgctggtccttagctcgtttgcctttctctggctaggctcggcgagcaaactcgggcccgtgggcagcattattgcgctggtgatcgcttttatcatgtcgctgcttggcgatgcgccgaatggagagttggcggtacgcgcggtgctgtatgcctggctgatggccgcatcaccgatgctgctattagtggcatttaatcttttcatcgggcggccaccctggaaactgttacgcgcaagtctggcagagcgcttagaggttgccggtgcggcattacgccacccggatgcccccagcctgcgtaaagtggaggagctgctgcgggaagggcagagcgaacatcaacagcgggctatgctcgtgcgcattttccatctgcggcctgccgcagaggccgcctggctaaccgccgccgttaacagcagctatcggttactgttggcaatttcagccctcaataaaaccgtaccggcgttaactcgccctgaactggcagactggtgcagttctgccgccgaggccattaccacaggccaggtggttgaaccccctgcgtttaatcagagtgggaaaaatgacgaagtcacccacgcgctggtgcaacttgcaacgccagataacgcggtagacaccagtgcgccaaaagcctcgtttttagctgcagacgcctttaccaatcccgtccatcagcaatttgccttaaagaccacggcggccagcgtgatctgttatctcgtctataccgtactggactggcaagatattcataccgccatgatcacctgttatgtcgctgcgctcggcacggcgggggagacggtacacaagctgacgctgcgcatcgttggctgcctgataggcgcattgatgggcgtgctttcgctgatttttattgttccgtcgctgagtgatatcggccagttaatggcgctggtgttcggtgcgctgctgctcagtgcctgggtatcgagtggcaatgagcggattgcctatgcgggaatacaaatcggactggcatttttactgaccgtgttacatggctttgggccgagtacggatttgggcgtcgcgctcgacagggtgctggggatcttgctggggaatctggtggtgtatttattattcacctatgtttggcccgtcgccattgctgattttgtccgcactcgcatccgcagcctggtcacggggttaagcaatctggccgcattggcaccaacagaacgcccggcagcgataagacaggcggcagcggttgaagaagaactgactacggcacgggaggcgctaaggctggttccttttgagccaagatcgctacgcccctctcccgaagaataccggcgtctgcaagctatccttggcgaaatggaaaacctctgtccggcgctgtttttgccctttgataagtcctcctccgatgtggaacggctcagccgactttcctcgagcggtggagtgattaatccctctgtaccaacaggcagcaataacggtttgccacccgccgttgaacttgagatccaacaaagcatcaggcgacttgaggaacttctcggatgaagccgcgcactcagactttcaaaatacgaactttcagcacggcagtggggctgtgtctgttagcaggctgtgccacggaccaattggcgttggccccggctagcccttcctctccctgggcgcctgacggcatcagcagtcatgaatttgctgttccggccaacccggcggtagcggaactccctgcaccgccagcgatcaaccaggaacaggtttaccagttacccgagcttatcgacatcgcccagatgcaaaacccggatacccgcatcgcctggcagcaggcgcggcaggctgcgctgggcgtaggtatggctgaagcgacatttttgccgatgatttcagccagcgtgatcggcggctatcaaagaacgcgcacgccgttgccttatgacattgacggccaacacgatctggataccaccggcagcgcggttgtaccggcactggcattgcagtggttaatcttcgattttggtcagcgtagcgctttgcaacaggcggccaagcacacctcctatgccgccaacgtcgcctttaacggcatgcatcaaaagattatttacgatgttacgcgcagctattaccaatacggtgcggcccagtcacgccgcaaaatagcgcaggagacgctgcgcaatagccagaaaatcctcgatgctgccttggcgcgaaacaaaaatggcgtcgcgacaacggtggaagtcgcgcaggcacgccagcaggtcgcgcagtcggaactgaatcgcgttgtggcacagggaacggaacgtgacgcatggcaggccttactggcagccatgggcatttctgcctcatcgcaaatcaaagtaggctatgccgaggataaacccttgccgcagacggccagtgcgccaacccagcagatgattaaactggcgctctcccagcggccagacgtattggcaacttatgctgctgctcaggccgcaaccgcaggcatcaaggcggcagaggcggacttcttgcctaaggtctatctcgccagcgcggtcgcgggtggcgatgggcgctttgatatgcagggattgccgcctattggtcagcaagcgtcctcctctagcattctcttgggcgttaccgtaccgctttacgatggtggaatacgagctgcccgtgtgaaagaggccgaatcacgtgctgccgtggcaaacgagactttccaaaagacgcaggaggctgcggttcgagagattatcgtggctgccgatacgttacaatctgcgctagaagccaaccaggcagcattgaacctggtaaaaaccgcgtttattacctacgacgccgcgctggagtcttatcgcaacggcgtagggaccatcaccgtggctaacgaagcagccaatggtctgctctatgcgcaacagatgagtaccgatgcccacgctgcggcactgatcgcggcggctaatttagcctttgtgatgggcaaaatgacccacgtggacccagagtaaatcaagggtggtaagccgacagctatcgacataaggaagaaaatcatgacatctccattctcggcactgatcatcggtgcgtcacgcggaataggtttaggcattgtcaggcagctatccatgcagggttggcaggtagttgcaacctgtcgcggcgcggtgccagccgatagcccggctgatacgcaatggctgaagttagatatcaatcatcaggatgaaaggattgccctgaaagagcggctgtcgccgcaacaattcgatcttatctttatcaacgcaggtgtttacgggccagcccatcaggacgttgcccaggcgaatgacgatgagatcgttcaactgtttatgaccaataccttttccccggttcgctgtgcggcagcgttaataccgctggtgaaaccgcacaccggcgtgatggcgttgatgacatcggagctgggcagtttaaatgagaacgacgcggcgacctacccgctgtacgccgccagcaaggcggctctgaatatgttaacgcgcgggttgcgtgataccgccgcacggcgggagttgactttgctgtcggtgcatccaggctgggtacaaacggatatgggcggaacgaatgccacgctgactgtcgaacaaagctgctctggcattgtgagccaggtgctggcctggcgaggcaaaggagggcatcactttattgactatgcaggcaacgtgctacgttggtaaaacgcggttttgtaggggcgctgctgcgcccatttaactcctgttccaatcttcccctcctcggcctgtacagggattaagggaggggaataacgctatccttacttacttcaactcaggccagtagtccttgttcgcctcaatcaagtcatcaagtatcgctttggcaactgatgcgctaggtacggttttcgacagcgtaatggcttgccacagtttctgataagaacgctgttcccaggcatcgaccaccagtttttcaaccgccacctgctggctcatcagccctttctggaattgcgggatattgccaaccaccagcggttgcgggccacttttgccaaccagacaggggatctcgaccatggcttccggatcgaagttattaatagcgccgttgtttggcacaatcaacagcatgcgctcctgggtgttgaaggcgatggcggttgccagatcgacgatgtaggaggcatgctcgtcaatttccaactcgcctgccgaggatttacccgcctggataatggcattacaggagccgaagacgtgcttctcgcggtgatccatgacctcgttagcgcgggtacgctccgggttggaatgctctactacgtagtccggaaacagatagtatttcaggtaggtatttgggaaggtttctggatccaacgcccagacatctttcgctttggcaaaggtgtcattccagctagcctccgtaccatgttcatctgatggcggaacgtagccaaatttagccacgtattcgcggattttaggcatcaagtcgttgccctgtagatcctcaatagacgtccaccagccgaagtggttaagcccgtagtaacgcacgcgcatttctttgcggtctttcaggccagcaatttgcgccatgcggctttcaatgccgattggcatatcgcagatgttgaggatttttgccgttgggcgcaaacgacgggttgcttctgccacaatcgccgccgggttggaatagttcagcatccaggcgtttggtgagtattgctccatgtagtcggcaatttccagcacgccgccgatggagcgcatgccgtaagcaattccacctggcccgcaggtttcctggccaagcacgccgtggcgcagagggattttttcgtctttttcacgcatcgggtatttgcccacgcggatgtgtgccatcacgaaatccacatcggtaaatgccactttggggtcggtggtgtagctgaattcgatgtctggcgcctgctctttcaggataattttgcacgcttcggcaatggtttcctggcgcgcaccatcgttatcatagaatttcaaggcgcgcagcgggaaacgatgctggtttgccagtaacatcagtacgataccaggagtgaaggtgctaccaccgccagctacaactacagagaatttattcatgatactgcctccgtcatggatttaagttcgctcgaagaagcgtctttcatcaggttttcgatctggtcgcggacctgcgggacgttcagccccacaatcacctgtataccgttgccgcgtcgcaccacaccgtgggcgcccagcgctttaaaaatgtcgtcgctttgcgtcagcgacatatccaccagggtaatgcgcaggcgggtcgcacagttgttaacgctcaggatgttgttggttccgccaagtgcttcgagaaaaccggcagcctggccttgtttggtttctttcgcggccgctgccgtagtttgctggcgggatgcttgatagtccgccttgctgtagagcttgatttcagcctcttcgcggcccggcgttttcagattgaaacgtagaatcaaggtgcggaacaccaggaagtagatagcggtaaaggcaagtccaatgccaatctgaataaacatcattgacgcatggttgtggaacatcgggatccagttttgcggcaggaactggtcaagcagaccgccacccatgttgcccaccacgccgcacatatacatgaccgtcgccatggtagcggccagaaatgcgtggacgacaaacagtaccggcgagataaacaggaaggtaaactccagtggttcggtaatgccgaccagcatcgccgttaacgtggcggggatcagcaggcctgccaccttcactcgattttcaggagccgtggtggcgtagagagccagcgcaatccccagacagccaaacaccttcgagttaccgtgcagcgcaaagccaccttctgggaacagcgttttcagcggcagcgtgctctgactgaactcctgcaaatgctgcgcccagtaaacctgaataccgccttccacgactgccggaccatagataaatgggccgtagataaagtgatgtaaccccgttgggatcaggatgcgttcaaggaaggtgtaaacccacacgccgagcgagcccgcgctgcgcaggaattcctgcagtgattcaatccccatctgtacttttggccagccgaacagagtaagccacgcgcaggggatcatgacgaagaaggcaacaatgacgacgaaagagctgccctggaaaatgccgaggaaaacgggaagttgcttttcgaaatagcggttgtggatagcggtgaccaatccggaaatcacaatcgcaccgataatactggtatcgagcgttttgatgccggcaatcatagtgagcccggttcccgctaccgggtcgacgttaaaatcaacgccaaagtactggccccaggtcattcccattgcgttaatgaagtagttccaggtcatgaaactgactagcacggccaggcaggcgcggccctgagcctgttttgccaggccaatcggtaaacccacggcgaaaatcagtggcatattacgaaataccgtccagccgccttcttcaataatgtggacgatttgcgcaaataagttatcgggtgcagtgagcgcttcgccgacaaacatcgggttacgcagcataatggcgataccgaccacaatcccggcaaacgggaatagcaggaccggggtaaacattgcgccaccaaaacgttgtatttgactgagcattttaaatcctcatgtaacaacctgtaggggaagtgaccttattctttaacgcgggtctgagaagcagagtagggagtacgtgaggggttatctttgtccgtcgcaccgattcgtgatcgcattcatggtttttgtttgcaccaagttgtctacttttagtcataaaactgtacacgacgatttcacttgaaattttcacctgatgaggttgtttgcaacttaaataaaaacagcctattaacttataggacgtggattatttaagcgcagtgcgaagcttcagagaggtctatcagtgatctacaaatccatagccgacaggctacgcattcggcttaattctgccgattaccatattggcagcccattgcctgcggaggttcgcctggcggaagagtttggcgtctcccgcatgaccattcgtaaggcgatagatttgctggtgggatggggattggtggagcgccgccacggtagcggcacttatgtcgcgaagaaagacgtacatcatgaaaccaccaacctgaccggatttatcgaggtgatgcgcaatcagggtaaggaagtggtaagcgacgtgctggagtttactattatgcccgcgccacccgctatcgctagccagctgcgcatcaagattgatgaacggatctactactcgcgacgggttcgttcggtggacggcaagcctctgatggtcgaagacagttatatgcccgcgaagctctatcgcaatttgtccgttgcccacctggaggggtcaaaattcagctatatcgaagatgaatgccacatcatcgtgcgcggcaattatgagagcctcacgcctgtactggccgatagaaagatggcgaagctgctgaatgtcgatgagctgacacctattttgcgcatcacctcgctgtcatacagcgacagcggcgatttcgtgaattattcggtgatgttcagaaatgccagcgagtaccaggtggattaccatttacggcgggagcatgtgaaagtataggaaatagggtggctgctgagacgccgttgaaaagcaaaaagcccgcttagttgcctaagcgggcttctctaaatatggctcctctgactggactcgaaccagtgacatacggattaacagcccgccgttctaccgactgaactacagaggaatcgtgtgaacgaggcgaataatagcgaggcgtattgggtttgtcaaagcactaaagtgaggaaaaagtgcgtttgctgccagattgagcatattggctcgtttttcggcactttgctttgatgaacaacgcgaaaaaatgcggaaccatgaggaaaagattagcgtgttcaacatgcagcttagcgagcatgacagaatgctaagtagcaccgtcataaagcgatcccacaaaaatactactcatcgaatataaattaatcagaagggaactcaacgccatcaggatgatgaccaccagtgaaacccaggaatatctgcttatttttttaccaaactgtgatagagattgtttttttattttccagtctcctgatgcttggttttttaataaaattgatgtaaatcaaaataataggtcgatgtgcctgacgataagtgattttttttaagattcttctatgttactctggcgggcattctatgctgatagcagtaatggggctctcgcagatcttgtcaatgcttgctttattactctatgctacgccaagccatttttatagcggtaaaccacgccgttcctttgtttcccggagttttttagtaatgaaaaaaacaatcgccatagccgcattgtgtgtgttgctggcagggtgccagactgcgaaaaccaaacctgccaccgccgccggtgtccctgcgccaaccccagttacacctagcgccaccgttacgcagccagctcagccgatggcttctgtcggtaccgatgacatcatgtatccctgcatgaaagagctgaatgctctgcaacaggttagcccgcggttgtatcaaacccgcagcgtagaattgaacgacattgtggcgcaggccaagctttacatgcgcattcgtgacaatgtcagcaccgacatccatcaaatcatggatgccgcctatcagttccgcattgctaaaacctgtaaccgtatcagcactgacctgaccaatgccttgatcgagcgtgtgactggcgcctaacgcgcataccccgtattcagatattccgggaatacatggttgttttaccagaaacgctctcttagggagcgtttttgttttctgctcatccaaaatgccctccagttgcaccagcaaggtgcgccaacaaattccccttattcttttctaacgctcgttgcctgccaaaaccagtgaacctcctcatttttacggctgagagcgccagcaaatcggccctatttttgtatgcgccgtcacaatggctagatttttgcttggataaacgcgggtaaatcggtggcgctctcgcgcaaattattttccccgactacacataaagtgactgctccacgtcatttacccgtcgtcctgcaactgccgccgttattggctgcaatttgcacccggccgggtctacggtctttcgctaaaacagtgctgaggaatgcaaaatgtcattgagattgctaaaaaccccgcttgctgctctgcttattggttgttttagtacggctttttctgcacatgccgatatcgtgattggcgtcgccgggccattctccggcccaaatgctacctatggggatcaatactggcgtggggcctcgcaggcagccgcagacatcaatgcggccggggggattaaaggggaaaaaatcaagctggtgcaaggcgatgatgcttgtgaacctaagcaggcggtctcggtagccaaccgtctggtcgatcaggatcacgtcgctgcggtggtcgggcacttctgctcgtcttccaccatgcccgcttcggaggtgtatgacgaagccgggatcattgctatcacacccggttccaccaacccgcaaatcaccgaacgcggcatgaataacatgttccgcatgtgcggccgtgacgatcagcaaggggtcattgccaccaattacatgctggataccctgaaggcgaaaaagattgccgtcatccatgataaggacacttatggccagggcttggcagatgccgccaaggcagaaatgaacaaacgtggcgtgaaggaagtgatgtatgaagggctgtcgcgcggtgagaaagactttaacgccctggtgaccaaaatcgcctcggtggatccagacgtggtgtatttcggcggctgccatccagaggcgggtccgttggtgcgccagatgcgtgagcaaggggtgaaagctaaattcttctccggcgactgtattgttaccgaggagctggtaacggcggccggcgggccacagtacaccactggcgtgctgatgaccttcggtaacgatccacgtcagatcccagaagggaaagcggtgattgccaagttccgcgagagtgggtttgagccagaagggtacacgctgtactcctacgcatcgatccaggccatcgccgccgcgttcaatgccaccggcggtaaagacagcgccaaggcgagcgagtggttgaaatctcacgatgtggataccgtgatggggaaaaaagcctgggataaaaaaggtgacctgaaggtctcagactacgtggtctaccaatgggatgacaaaggcaaatatcaccagctctgatgtaaagatcaacggatccgtacgtatggcggatccgttccttaacttcctttgggccgcgtggtgctgaacttgcggcccgcccatcaggtgagattgcttattatggatgtattcttcctgcaacagctgattaacggcctgacccttggcgcggtgtatggcctgatcgccatcggctacaccatggtgtacggcatcattggcatgatcaacttcgcccacggcgaggtgtatatgatttctgcctatctgtgtgcgattggcctggcactgctctctttctttggtctgcactctttcccgctgttgatcctgggcaccctggtattcaccatcgtggtcaccggtgtttatggctgggtgattgaacgtattgcttataaaccgctgcgtaactccacgcggctggctccgctgatttctgccatcggtatgtcgctgatcctgcaaaactatgcgcagatcagccaagggccgcgccagcaggggatccccactctgctggacggcgtttttcggctcaattttgatggcggtgtgatccagattacctacaccaaggtatttattctggtcgctgcactattgggtatggcggtgcttacctacgtgatccaacgcacgcgcctggggcgtatctgccgggctacccaacaggatcgcaagatggcatcgatactcggcatcaataccgaccgggtgatctcgctggtgtttgtgatcggcgcggcgatggctgggctagcaggggtgctggtcaccatgaactacggcaccttcgatttttacgtgggctttattatcggcgtcaaagccttcaccgcagcggtgctggggggcattggctcattacccggcgcgatgctcggaggcttgctgcttggggtggcagaggcacagttcgccggcatggtgaactcggattacaaggatgtgttttcattcggtctgctggtggtgatcctgattttccgccctcagggcctgctggggcgaccaatggtcgctaaggtgtgagggaaaactatgtctcaatccactgttcatcaagggctgagtgttaaacgcagcctgttggatgcggttctcgcgggcctgatcgcgctgattgtgtttggcccgatcgtcggcatcgtgctggacggctacagtttcaactttgagccacgccgcctggtggtgattattgcggtagtgatggcggggcggctgttactcagcctgtttttgcaaacgccgctggggcgcaaggtgtcggcgcgttttgagggaggcaatgacggtgtttatgttcggccagtcggcgccagaacgagcctgcgttggatcctgccactattggcggtgttggcattgctgttcccgtttatggcgaccaaatacctgctgaccgtggcgatcctcggcctgatttatgtgttgttagggctaggattgaacattgtggtggggctggccgggttgctcgatctgggttacgtggcgttttatgccattggtgcctacggtctggcgctgggctatcagtatttgggcctgggtttttgggcgatgttgccgttgggggcgctaatggcggcgctggccggggcattgctggggttcccggtgctgcgtatgcacggtgactatctggcgattgtgacgctgggctttggtgagatcatccgcctggtgctgaataactgggtatcgttaaccggcgggccaaacggcgtttcggttcctgcaccgaccctgttcggcctggagtttggccgccgagccaaggaagggggagtaccgatccatgagttcctcggtattacctataaccccaacctgaagtttatcttcatctacgcggtgttgtgtctggtggtgttgctggtgctgttcgtcaaacatcggttgacgcggatgccgatagggcgggcgtgggaagcgttacgggaggatgaaatcgcttgccgttcgctcgggcttaatcatgtgctggtcaaactctcggcgtttatgatgggggcttccaccgcgggtatcgccggggtgttctttgccacctatcaagggttcgtcaatccaacgtcgtttaccttctttgaatcggcgctgatcctggcgatcgtggtattgggtggaatgggatcgactatcggtgtcgtgctggcggcctttgtcctgacggtggccccggaactgctgcgcagctttgccgaatatcgagtgttgctgtttggcgtactgatggtgttgatgatgatctggcggccacgcggcctggtgcgtatcagccgtagcagctttacgccacgcaagggggtagcaccatgagcgatgccattttgcgcgttgaacatttgatgatgcacttcggcggcatcaaagcgctgaacgatgtgaatctcgaagtggagcgtgggtcgatcaccgcgttgatcggcccgaacggcgcggggaaaaccacggtgttcaactgcctgacggggttttaccgtgccagcggcggggcgatcctgctcaatacccacaaacggccgattgatgtgatccgtatcctcggccagaaattccgtgccggggactggattaaccccgcgcaactggggtcgcgtctgtactacaaaatgtttggtggcacacatctggtgaaccgtgccggattggcccgcaccttccagaatatccgcctgttccgtgagatgtcggtggtggagaacctgctggtggcacaacaccgtttgagtaaccgcaacctgattgctggcgtgctcaatacgcctgcttatcgccgggcagaaaatgaagcactggaccgcgcattttactggctggaggtggtcgagttggtggactgtgccaaccggctggcgggggagatgtcctacggccagcagcggcggctggagattgcccgcgcgatgtgcaccaccccggaaatgatctgcctggacgagcccgccgccgggttgaatccggtggaaaccgcgaccctgagtcggattatccgctttctgcgccagcatcatgaaattacggtgctgctgatcgaacatgatatgggaatggtgatggagatttccgatcgggtgatcgtactggaccacggcaatgtgatcgctgagggaacgccgcaggagatccaacacaatgacagcgtgatcgccgcctatctgggcgcagacgaagaggagctggcgggatgagcgaggtgatgctggaatttcgcgaggtagatgtccattacggcccgatccaggcgctgcaacaggtgtcattgcaggtcaggcaaggggagaccgtagcgttgatcggggccaacggggcggggaaatccaccttgctgatgtcaatctttggccaacctcgcatcagcggtgggcagatcctgtttcaggggacggatatcagccagcggtcgacgcattttgtggccagcagcggcatcgctcaggccccggaagggcggcggattttccctgacatgagcgtagaggaaaatctgctgatgggcaccatcacccttggcaaccgctatgccgctgaagatatgcaacggatgtatgagctgtttccgcgcctgaaagagcggcgtaaccagcgagcgatgaccatgtccggcggtgagcagcaaatgctggcaatagcccgtgcgctgatgagtcggccaaagctgctgttgctggatgagccgagtctggggctggcaccgatcatcgtcaaacagatcttcagcattctgcgtgaactggccaatggtggcatgacgattttcctggtggagcaaaacgccaaccatgcgttgaaactgtccgaccggggttatgtgatggtcaatgggcaaatccgcctgagcggcagcggcgcggaactgctgagcaatcaggaggtgagaaaggcttatctggggggcgcataaaggcaatcgccccgatgaggggcgcattgaacatcctcgagcgaaggggcgccgcatgtgtgcccctgctgttgaaaaaaacagcgtcacaaaaacgtgatctaggtcgcattctggttacgggttagttaaaatggcggcactgccagcccctgttccggaacaccttacgatggatgaaatcagcacttcccgctcgaccgcctggatgcgcgtggtcgtcttggccatttcggcatttatctttaataccaccgaatttatccccgtcgggttattgagtgatattgcccaaagctttgggatgcaaaccgagcaggtgggtttgatcatcaccatttatgcctggatcgttgccacgatgtcgctggtttgtatgttgctgaccagcaaaattgagcggcgtaagctgctgatcggggtatttatcctgtttattgccagccatgtgctcaccgccgtggcctggaactttaccaccttggtgatctcgcgtgccggtgtggcgctggcgcactcggtgttctggtcaatcaccgcgtcattggccattcgtgtcgcacccgcaggcaagaaggcgcaggcacttagcatgctggcggggggaaccgcgctggcgatggtgttgggcttaccgttagggcgagtggtggggcagctactcggttggcgtatgacgtttattggcattgccgtgtgcgccaccctggcgttggtgatgctgtggcgcttgctgccggtgctgaaaagcgagcattccggttcactggccagcgttcccctgctgttcaaacgcccggagctggtcagcctgtatatgttgaccatcattgtggtgacggcgcactttactgcctacagctacatcgagccctttatccagaccgtggccgggttatctgccaacttcaccaccttgatgctgttgctgtttggtgctgcgggtattgtcggcagcctgctgttcagccgctacagcgaacgtttcccgtcggggttcttcatgggggcaattggtatgctggccctcagcctgttattgctgttgcccgcctccggtaatgaaacgactctgacgttgctgtgtgtggtttggggcatggccatcatggcgattggtctttcaatgcaggcgaaggtgctaagtctggcaccggatgcgaccgatgtctcgatggcgatcttctccggtttgtataactttgggatcggcggtggggcgttgctgggcaaccaggtcagcctgcatctgggaatgccaaacattggcttcgtcggtgcgccgttggccctgatcgccctcggctggtgtgtattgagtttctaccgcagcgaacgcttgcagcaccatcaggcctgatccacgttcccttgattgccgggcccggcaatcaagggctatctaagacttaccctctctttagctcccatcctgccgccatgttttgctaccagatacgcaaaatatcaacgctcatgtttcaccgtcatctaaatgctgggatcggcccccagcttcatcattgtggccgctgtctctcgtactaagctccgacataatgcaatttataggtttacacctatatagcttttgacctatattgctaaggagcacatgtgtgggagattaaaacaacggatatgtttgatgagtggttcagccggttggaggacactgacagagcttctgtgctggcgtcactcattgtactacgtgaaaaaggtcctcagttgcccagaccttatgccgacacggtaaagggatcgcgctacagcaacatgaaggaactacgcgtgcaaagtcgaggcataccgatacgggcattctttgcctttgatccacgtcgtcgcggtattttgctttgtgctggtaacaaggccggtaatgagaagcgtttttatgaggtgatgatcccgattgccgatcgggagtttacccaatttctgaatacatcagagaacaaggagtaggccatgggcagaacactggaacaaatcctggcggaagaaaaacctgaagtagtggccagcgctgagcgcattgcggcggatacgctgcttaatattcacctggccgagcttcgtgagcgggtgcagaaaacccaggttgaaatggcacaggcgcttggcatcaaacaacccaccgtcgcgggtatggaaaagcctggccgcgatctgaagctctcctcgctcaagcgctatatcgaggccgcggggggcaaactgcgtctggatatcgagctgccggatggttcgcactacgggtttgttatttaatcaactggctcgattattcaaccctaaatctgtcgcggataggtttgaacgctgtagcttgccaggcgacgggtatatattgtttgcctatcgtcggcaacggcagcgtttgaactttgcgccatcttattaggagtttgattatgtccagcacccatctgtcaggtacttttacgctcggcacgcacaccgtcaagcggctcggctatggcgccatgcagctcgccggaccgggagttttcggtccgccgaaggatcctgaaacggccatcgcggttctgcgtgaagtgattgccaacggggtcaaccatatcgataccagcgatttttatggcccgcactataccaatcaaatcattcgccaggcactgcatccttatgccgacgatctggtcattgtcaccaagatcggtgctcgccgcgatgagcaaggtgcatggttgcctgcgttttctccggcggagctgacccaggccgtgcatgacaacctacgtaatctggggttggatgtgcttgatgtggtcaatctgcgctgcatgtttgatgcacacggcccggcagaagggtcgcttgaagagccactctccgtgctagccgagctacaacagcaggggctggttcgccatatcgggctgagcaatgtcacctcggctcaggttgcgcaagggcagaagatttgtgagattgtctgcgtacagaataattacaacctggtacatcgggatgacgacgcactgatcgacgaactggctggcaagggcattgcctacgtgccgttcttcccgctgggtggattcacgccattgcagtctacgacgttgtcggacgttgcgcagcaggtaggagcctcgcctatgcaagtggcacttgcctggttgctgcagcgttcaccaaacattctgctgatcccagggacatcttccctggcacatctgaaagaaaatcttgccgcagcccaactcaaactgccgggcgaggctattgcgaagttgaatgcgatctaaggcaacccgacaacagtaacctctgcgggagccctgggttcccgctaaaaattcatcctcccagcattctcatccctctgcggatcaacgccagtcctgttttctttaatgtattaataaaatccattcttatcagtaaagagacaaatgttgtcttaaatgtgtccattttataagatgattgttaatatgttaacgaatgatcaccaagactcacgcccacaaccgctgaggcgttattgatgataaaggagccgctatgccacctgcctttactaaccggccgccacgttggttgatcccgctactgggatcgctggtggcttttggcccgctgtcgattgatatgtatctgcccgcgttacccgcgatggggcaacaactgcatgccacacaggggcagatgcagcattcattgggggcattctttgccggtttttgcatcggtatgttgctatacgggccgcttagcgatcggctaggcaggcgaaagctgttgctgagcggcatgctgctgtttgtgattgccagcgtgctatgtacgcaggtcacgcaggttgagcaactggtggtattgcgggcgttacaggcatttggtagcggggccgcagtggtgatggcacgcgccatcgccagggatgtttatacctcggatgagcttccccgagtgttatcgctaatgacgctggttaccatgattgcaccgctgctggccccgttgttgggcggtgctttgctgatggtcttcgactggcaagccatcttcatgttgttggcggtggtgggctgtatcagcggattattggtgttctgggtactgccggagacgttaaaaacccctcctgggcagtcaggcagcatcctgaaggcgtttcataactattgcctgttggtccgtgacagagaagcgatgggcattattgctactctggcgttttccttcgcggggatgtttgcctttatcagcggttctccctttgtctacatcagctacttccaggtgcccgctcagtattacgggctgctgtttggctgcaacgtcattggcatgatcgccgtgctgctgctgaacgtgcggatgctgaaggtctacagcctgccgcgcttattgatgatacaaagcagtgcccaggtattgtttgggctgttgcttctggtgttccatcagcagagcctctccatcctggtgattctggtggtgttgtttatgtcgctggtgaatgctattggcaccaacagcctgtcgctactgttgcaacaacgtggccaacaggctgggagtgccagtgccctggcgatctcgttgcagtttggtatgggggcgttggcaagcctggccgtttcctggttgcaggatgacacgccgtttgccatgacgttggtgatggccgtctgcgcggcgctaggttgggtagggcagaggatgtctgtggcgcgaataggttcacggctgcatgaataggtaggatgtggtggtgaagttttcatgcgcattgccgttgccgacaatgcgcataaggtttaccgagtaaactcactgactattggcaataataccgcgcaacagcttcttcaaaatgcccacttcgtctgccgtgaaggcggacaggacctgctcttgctgtttggcagcaatatctctcagcacgctggcctggcgttctcctgcctcggtcaagtgatggccattctcagtgctggacaccaaacctttacggtacaacgcttcctgcgcctcttcgatttctctggttggcatcgccatttctgccagtaggcaggccttatcaaggcaggcgtcgctgtccaacaccagcagcattctggcctcgctggcccgcaacccggtggagagctgcttgggctggtagctgctttgatagctgcgcagcgcctgggtgagcaagtagaagacgttgttattcaggcgctcctgcctggcgctacctactgcgttctgtgcaacgcgctccgccacctgcgggtaaggcagcaccatggaataggatccctggtgatacaccagcggtgcgcggcccaggtcgtcaaacgcgaccactttaccaatcaggatccagtggtcaccgccgtcaacctgctgatatttctcacactgaaagcgtgcggcacagtcggtcagcaaaggcacgtcacctgcgccgacctccacctcaatcccggcaaatttatcctcgctggggcgggcgaaacgattggagatatccatctgatcggcggccagcacgttaatggcgaagtggctggcttgttcaaagatcgcgtagctgccggagcgtttatcaatgctccacaataccaacggcggatccagtgataccgagttaaagctattggccgtgactcccacgcgggtgccatctgcggttgctgctgtcactaccgtcacgccggtggcgaaattacccagcgcacggcgaaatgcgcggggatccagagcaggttctgtgtgatgtgtcattaaataggttctcctgctcgttacaccatcgtcggatcgggttctaaccccatcaactcgcggcctaatatctgtgcacagacatcgtaatcggtataggcatgtgccccggtcatgtgtgagtcgcggaacaatcgctggatctcattgctttccatccaactggttgcccctgcggcgctgaacaagcgatcaaccgattcgatgcacattttgaccgcgtaggcctggttggtacgccagaacgtcaatgtctggtgagaaggatattggtgcttgcggccgtgttcggcatgttcttgccaggttttttccaaaaaggcacgggcggcagcaacctgatgggtggactctgccagacgcatcagcgccggggtggccgtccccacgctggctccggtataggctcgcccgcgggtttgggttttttctttaaaggcgnnnnnnacgcggttttgggttttttctttaaaggcgaccagcatacgttccgcaacgccaaggctgatggcggcaaaaccgcaggcgaaatagggacgatagggtgagtagaaaatattactgtctgggtagaggccgaaacccgcagagcgcccgtgcatcatatcctgagcggcttcaatgcggtggttcggcacgaaggcgttttttatgaccaacgttttggaaccgctgccgcgcatgccaaccgcaaaccagtcatcacgaatttcgtaatcgctacgtgggatcacgccaaagctgtagagcaactcaccgtcggcgtttttgcggcgaaagccgacaatcgcccattcggcgtggtcacaaccgctgctccagcccatttcaccgctcagatagacaccgccttcggcttcctcaatacggccaaacggggcaatactgctgctggcggtggcatctggattatcgccccagatctcttgttgcagtttgggggaaaacatcgctatctgatggctgtgggtgcatagcaaactgaaagcccaggcggttccgccacaggcgccggccagcgcggcgacacaatcggtgaattctggcagggagatttccaggccaccgaattttttcggttggaacacccggtgcatacctatgctttttaacaaacggatattctcatccggtacttttcgttcgctttccgcctgtgcggcgttggcagcgataagtggcagaatgggcagtaatttttccagcatcgggttgctagtattcatcagttggttccctcggtaggggtgggcgtgggatgagtatgggggaaggatattttaatggaatgtaacattcaggtaaaaaattgtacttttcatgttaaatgtcgagggtgtgatctggaggcgagtttgaggctcttggttagtcagctgcaatggactgataccagattcataaaactttgcgtaagtaaggaacgcggtagccgtagtctggcttgtgggttttcctgtgcgttgcgcagcttcggtaggttgcatcaggcgtttggcaatgtcggaatcatttagcactttatcgctcagtgcctgattcacattctgggtgaaatggagagtcaatgggccaggttagatcaggtgcccgtcatagatccgcaagtaccgatggtaaaaatattcaatatcggtcggtgagttctcagtttttcggcgtagggtttctaaaatggagtgaagtttatccggagagaaccatgaagcctgaaaacaaagtacgcgtgctggaaaggatctcaccacaaatgcgcgagatcctggcgtttcagcaagcgcatccacagcctgctgttgacgaaagtgatcttcccgcgcagcggcgagcctacagtgatgagcgtcgctactggaatgaaggtggaccgcagcctgttcgtagccaggatattatggtacccacattctgctacgagacaaaaacccggatttacatttcacaagagcgcgcccagggaacgcttttctatctgcatggcggtgggtttgttttgggtaatctcgatacccacgacaggatcatgcggctgctggcgcactatactggctgtactgttatcggaattgattaccccctttctcctgaaactaaattcccgcagggcatcgaagatattgttgctgtgtgtcagttttattatcaccacgccgaaagttatgcgctgaacatggaacagattggcctggcgggtgattctgccggcgctatgctggcactggcttccatgttgtggatgcgtgataaaaatatccactgtggtcacgtgaaggggcttttgctctggtatggactgtatggtttgcgagattccgccagtcgacgtttgtatggcggcagttgggatggactgacgcaggaggatttagccttctatgaaacggcttatctcaataaggtaagcgatcgtgaatcaccgtattactgcttgtttaataataatcttagtaatgccatgccaccctgttttatcgccaccgcagagtatgacccgctggttgatgatagcgtggcactttaccatgttttacaagagcatggccaggagtgcagctacaagatgtacccgggtacgctacatgcttttttgcattactcacgcatgatggatattgccgatgaagcattgcgcgatggtgcacaatattttcgccagcagttgcgctgaatttgaattttatttttcgattagggaaactgtatgaatgataaatgtattgataaaccgttgtatttattaattgcggattgggtaatggcacaaaaccgctggattagtgccaaagaaattgcctgtgagtttaatatcgacccctgtaaagccattaacaccgtttcgtatattctggccgatgttgaggaaatcgagtgtgaaaccaaaacgatgcctactcagctcaagggcagaggatgccagtgccagcgattattgaaagtcagcagtattgataagcagttatacgcccgactggaatcttcttctgaagtaaagaatgtattccatatctcctcaccccggctggcagcagtgccgcctggggagcttaaccaagagcagaagtggcagtggatgctatccaaaacacaacgtcggtaggtttataaccttcatacttcaagttgcatgcgtgttggtaatactcgatcctgtgaggctgcagcaaacaggcgcgtaatgcgcctgtttttacaggtgtttaggctttacatctgtcgtgccgcgtagcctggggcggtttgcttcaaccttgcacattggctctgtaggataaagcgacgtatggcatcgtgctgccagatcctgatactctctggtattgagttttttccaatgtcgttcttcatcagttaccgctcgcagatgtcgggctgggctgccaaccagcaactgccgtggtgcaccgataaacccagctttcacaaaactcattgccgcgacaatactctcatccccaattattgcaccgtccatgatcacgctgttcataccaaccagcgcatcacggccaacgatgcaaccatgcagaatggcgccatgaccaatatgtccggattcatgcacgatggtgtccgtatcgcagtaaccatgcatgatgcaaccatcctgaatgttggctccggcctcgataatcagtcggccatagtcgccacgcagtgaagcatgtggaccgatgtaaacctgcgcaccgataatcacatcaccgatgatcaccgccgatggatgtacccaggccgtggggtgcacaacaggtgtcagcccttcaaacgaataaaaactcatctccctctcccatcaggaaagcgctccgtctcatctggagtattgcaaattatctgtttttccattgtggttcgcgtttctcagtaaacgcctgtggcccttcgagcgcatcttctgaatgcagtacactcggataatgtttaagtgtaccgctacgcatcagttggtagcctgcttcaatcggcaattcgcgggtagcgcgataaatctctttcagggcggcaatagcgagtggcgcgctggaaacgatttgcgcggccagttccctcgcactgtccatcagagcatcggggctgacaacacgattgacgattccccagtggagcgcctcttgtgcatccatgcgtctgccggtcattaccatttcattgacgagggcaggcggcaggattttcggtaagcgcagtacgccgccgctgtctggcacaatccctaatttcgcctcgggtaatgcgaagctcgcgttatcagaacagacgatcatgtctgctgccagcgccaattcgaagccgccgccgaaagcatagccgttgacggcggcaatcacgggtttatccagattgaagatttccgtaagtccggcaaaaccaccaggaccaaaatcagcgtctggagcttctccttccgcggcggatttcaggtcccaaccagcggagaaaaaacgctcgccggcaccggtaataatcgcaatgcgtaattcagggtcgtcacgaaattgcagaaaagtttcccccatcttgaagctggtggcggcgtcaatggcgttggcttttggcctgtttagcacgatttccagaaccggaccgttacgggtgatctgtaattcattgttcatttttcccttccttttcaatgtattattgaagttgcttttttatcacttttccagagcagttgcgggggagatcctgacgaatttccatacacgtcggaactttgaatttcgccatgttggactcgcaatagctgaaaaattcgtggtcgctaaaactttccccttcatgaagaacgataaacgctttaattgcctgatcgcgcatagcatcaggaataccaatgacggcaacgtcttgaattttcggatgcgaggcgagaatattttcgatttcactacaggagatattttcgccgccgcgtttgatcatattgctgctgcgatcgacgaaatagaaaaagccatcttcgtcctgataaccacaatcaccggtgtgtaaccaaccgtgttggtacgcatgggcggtcgcttccggctggttgtaatactctttgaacagcgtttttcctggttcacctttaatgcagatttcgccgacttcaccaggcggaacaaccgcgccgcggtagttgcggatttgcgcttcgtagccaaaaccagggcggccaatggaaggccagcgtcgcatgtctccaggacggtcgccgataatcccgacaatagtttccgtcataccgtaagaggtcaggagtcttacaccaaagcgcgcaataaaggcctctttttcctcaaccgaaagattgagataaaacagcacttcacgcagtcgatgctgcctttcatctggattgtgaggctgggccagcagcgttcttatcatcatcgggatacattcggtgaccgtcgcctggtacttgaggatcttgctccagaaagcgcgggcgctgtatttttcaagcaacacaaaagtggcccctgcggagaatgccgccatggcagccgtacactggcaatcaatatgaaacgcaggcatgacagtgagataaacatcatcggcacgcagcgcgcactgccaggcagtgtaatagcctgcaaagcgcaaattgtagtgagtgatgacgacccctttagggcgtgacgtggtgccggaggtgaacaaaatttctgctgtgtcattaacgctcagctcaacatgacacattagctcaggcgcgtgctgttgctggagcgctgaaaaatcaagcgtaaccgcatccgtggcaattgccaggtttgaaatgagaagaatgcgctcaagtgaggtgttgttttcgccaagtatctgccgatatagcggataaaagtgatgggtagtgaccaccatgcgggcctggcagttatcaaccagccaccggctttcctcgattaaaaagcgagcgttgatagggactacaatagccccaattttcgccagcccaaaccagcaaaaaatgaactccgggcagttgtcgagatgcagggcgactctgtcacctttttccacaccaagcccatggaagaggttagccgtgcggttaatttcctcattcagggtctggtaaccgaattgccgtacctcacctgtagcggattcaaaaatcagtgcggttttgttgccattaacatccgccatgttgtcccacatctggcgtaagttttgtccacctataagatccattgaacgcttatcccgctcttagacgcagatggctcaaacgtgggtaacaatcagtttgagccggtcatgcgcttactctgttgtcttggccagtcctttagcgaccagccccctgatatcagcttcgctgtaaccgatactttgcaaaattgcgtcagtatccattccgtgagaaggcatgctgcgccaaattttccccggatggttgcggaatttaggcatcacattcggccctttgcaggtatcgccttccagggttttccactgggtgattgattcacgggcaatgtactgcgggtttttttccagctcaggaatggttagaactttggcactggcgatgttcagttctgcaagtcgtgccagcgcttgctcaatggtgagtgttgccagccatgtgtccagtttttcttcaacgagcatgccatgagggcattccacgcgatgaataagctgtgtccctttcggaatttctggcgtaccgatcagatgcgcaagaccaatatcggcgaagatttcctgaatctgggtgatgccgacaatctccatcacgatataaccgtcgctacaggtgtaaagtccacagcccgcgtaataagggtctttgcctttggtcatgcgcgggcaaacttcaccgccgttaaagtaatccatcatgaagtactggcccatgcgtagcatgacttcgtacatcgcaatatcgatactttcgcccttgccagtctggcgcgatttatacagcgcagccagcgccgatgtagttgccgtcatgccggagaaatagtctgcggtataggggaaagcgggcattggctggtctttatcaccgttctgaatcaagtagccgctgaacgcctgagcaatggtgttgtaagcgggcaggttggtgtactgtggatcaccgtattgcccaaagcctgataaatgggcaatgaccagacgaggattgtgctgccacagcacctcatcagtgatgccacggcgggcaaacgccggacctttactggcctcaataaagatgtcggtcgtttccattagcttcaggaatgcttcgcggccttcatctttaaaaatgttgagggagagagcgcgtaaattacggcgcgaaagctgcggataatgcggttgaacgcggatggtgtcggcccaggcgacgttttcaatccagataacttccgcgccccattcggcaaacatctgtccggcaaacggcccggcaatttcgatcccggaaaaaacaactcgcagcccggataagggaccaaattcgggcattggtaaatgagtggtcatggtttacacctcgtcataaaactgaacagaggccatcgagcctctgcgtcagtcagcaatggtttagcgatattgtttcagcactgaacgccccagagtcaggatctgcatttcatcagaaccgccagataccctgtctactcgcaagtcgcgccagaagcgggtaatacggtgattaccggcaatacccactccgcccagcacttgcatagcggcatcgacgacttcaaatgctgcattggcgcagaagtatttacacatcgcggcgtcgcccgaggtgatgagcccgttgtcactcttccaggcggtttccagcagcatgtttttcattgagttcagtttgattgccatgtgggcaaatttttcctgaatcagttggaagcgcccgatagtttcgccaaactgcacacgctgattggcgtaacgtgccgcatcttcaaaagcgcacattgcggtgccgtagttcgtgagcgcaacgaggaaacgctcatggtcgaactcctctttcacgcggttaaaaccgttgccttcacggccaaacatatctttctcatccagttcgacattatcgaacgtcagctcacagcagctatccatgcgtaggcctagcttttccagcttgttgattttgatccccggcaagctcatatcgacgcaccactcggtgaatactgctttttcaggcgaggcggaatcacgagccatcaccactacatacggagtgtacgcgctgctggtgatgaagcatttgctacccgtcaggtaaaccttattatttttacgggtataggtgctttgcaggctaccgacatcggaaccggcacctggttcggtgatagcagagttccacatctgtttgccggtaccctgaaatgccattattttgtctatttgctcctgagtgccttcacgcaggaaggtattgaacccacctggcaattgataaagaacataggttggagcacccagccgcccaagctccatccagacggcagcaagagtgacaaacccggcttccagtccgccatgttcttcaggaataagcaggctatcgattcccatatccgccagcgccttcacaaagcgctccgggtagacgctgtccttatcacacagggcgaagtaggtttcccagttttcgctggccattaattcgcggataccagcaacaaacagttcctgttcatcattcagtctaaaatccatctatttaacctcttaatttattgatttatttgttaactattagtctttccagtgtatttttgcgtctttgataaacgaaagcgtgaccatgatgttgacgaagaaaagcgggcatccaccggcgataattgccgtctgtatcggtttgagtccgccgagtgccagtagcacgataccaatgacccccactagaacagaccaaccgatacgcaccagcagcggtggttcatcgccatctttcattgagcgacaggtcgacattgccagggtgtaagagcaggcattaatgagcgtcacagtggcgatgaagcaaagaatgaagaaaccccagatggtggcagttttgagtggtagagcggcccatgtttcgatgatggcgcgtggcacaccgtacagcttgataagctcaggaatattgacaacgttttgatccatcaactgcaaggtgttactgccaagaatggtccacagcaaccaggtcgcagcggtcagcccggcaaccataccgagacacagttcacgcacggtacggcccttcgaaattcgggcgaggaagatgctcatctgaatggcataaatcacccaccaggcccagtagaaaacggtccaaccttgagggaaaccacttttagctatcggatcggtataaaacagcatcctcggtagatacatcagcaacgtacccacggagtccgtgaagtagttcatgatgaaactggcaccgccgacaataaacacccacccgagaatcaagaaactcagatagctgcgcacgtcactggcgatttttacccctttttgcagaccgcaagccacgcaaatagcattcagaattatccagcaggtgatgatgatggcgtcgagttgcagcgtatgtggaatgccgaacagaaactgaatacactccgtcaccagtggtgtcgcaaggcccagactggtacccatcgcaaagattaacgccaccagatagaagttatcgatgatggtaccgataattccgttggcgcgtttttcacccatcaacgggataagcgtactgctcgggcgaatcacatccattttgcgaacaaagaaaaagtaagcgaatgccacggaaaggaagctgtacgttgcccacggcaacggtccccagtgcagcaggctgtacgccaggcctaactcttttgcctgtatggaatagggttcgaggccgaacggtggactggagacatagtagtaaatttcaatcgacccccagaacagtactgcagcggaggtacatgaagcgaacatcataaaaatccagctagacgtgctgaattccggtggatcgtcaccgagacgttttttggcgtagcggccgaaaaccaaccagaaccagccgccgaacatgactaccatgtaccattcaaaggcccagccccagacgttagtgacataactgaagatggcattaataacagtattagctgcattcaggtcgcggacggttagccagcagagaatgccgacgataatcagcggcgggaagaatacttttggctctattcccacctttttcttttcatttttcatagtcaatcccgcttttatatggcgtgaataaggatgtttgaaataataagtttctcgtttgtttaaattgtgttaattttatttcagttgaaatgaatttctcctgatagagtaagctctcgtacaatgctaaatactagtaaacgcctgtatcgttaactctgtcaaatttgtttttgtagtaagcataccgctagaaattatctttatttcatttaaaacaatgggatgtgttttgttgtgaggatttttcactctgtgaggttcaatgtttgtgaggcaagtggcaatattgaatatttccatgcttatggcttggcatgttcaatattggtgattggggttttactttttcacttttggatatgatatttattcacccattgctgcaatgactaatgctttcattaatatatcaggagatgtgatgaggattattacatgttacaaaagtgtgcccgatgagcaggatattacggttaattatgttgatggttcattagatttatcccgtgccgaaagcaaaatcagccagtacgacctcaatgctatcgaagccgcggttcaactcaaagtacaggttgcggatgcgcacattgtcgcgcttagcgtgggcggtaacatcctgaataatgctaaagggcgaaaggatgtgctttcacgcgggccggatgaactggtggtcgtgattgatgaacaactggaacacgccttaccacatcacacggcaacggtactaggcattgcagttaacaagctagggtttgacctgattctatgtggtgacggctcagccgatctctacgctcaacaagtgggcctgttgcttggtgaagctttgcgcattccggcgctaaatggtatcaaaaaaattctttcgataagtgctgatatgattgtggttgaacgcgaactcgaagatgaaaccgaaaccctttccgtcccgctgccagcggtgatttgtgtcaccaccgatatcaatactccacaaattccttccatgaaagccatcctcggtgccgcgaaaaagcccgttcaagtatggatggcggcagatgtgggtatcggggatgtcaccgctttgtctgaacagcaaatcgttgctccaaaacagaaagaacgtttgcgagtcatcatcgaaggtgatggcgatgaacaggttgcggcatttgccgggtatttacgcaagattatccagtaaaaaggggcaggttatgagcaagttttcaaacgtttgggtttttagcgataccttgtcccgactgccggaactgatgggcggtgcacagaccttgggtgagaatattcaggtgtttgcccttaacgaagaacacagtacggcggcatttcacctgggtgcaaaccaggtctggcagctgcaaggaaaaccggacgacagtattatcgaagattatgcagatactctggttgagacgcttaaaggccagagccaaagtggactggtcctgttgcctaatagccgtcgtggcaaattgctggcggcaagactaggggctcgtctaagtgctgctgtagtgaatgatgccagtggcgcggtggtttctgatggcgtgctggtggcaaaacatatggtttacggcggattggccttcagccatgaaaccctttattcacccttgtgcatactgaccttgagtggcggaactttcgaggcggcgaagcctgatgtcgcaaggagcggcacggcacaaccggtgcagtggctggcccccgaatataccattgtttgcactggcaaacaggtacgggaaagccattccgtggatcttgataaagctcggctggttgtcagcgttgggcgcggtattggaagcaaggagaatatcgctctggtgaatgctttgtgtgaagttatcggtgctgaactcgcctgctcgcgtccggtcgcggaaaacgaaaaatggatggagcacgagcgctatgtaggcatttcgaatttactcctcaaacctgagctttatctggccgtagggatctctggccaaattcagcacatggtcggtgccaatggtgctcagactatcgtggcaatcaataaagataaaaatgcaccgattttccagtacgcggattacggcattgtgggcgatcttttcactatccttccaacgctgactcgtctgctagccagttgatctctttcggcagcgtgtgaaagtatgcgttgccactttattcaggttcaggagtggttatgtccgaagatgtcttcgataccatcattgtaggagccgggcttgcagggacggttgcagcgctggtacttgcccgagaaggggcgcaggttctgcttattgaacgcggtaattctgcgggtgcaaaaaacatgacaggtggacgcatgtacggccacagcctggagcgtattatcccaggttttgccgagcgggctcccgtcgaacgtgtgatcacccacgaaaagttgtcgtttctgacacaaacgcgcgcgataacattggattatcacaatggcgacgagccgaaagccggggaggtttcttactcggtattgcgcagcaaattcgatgcctggctaatggaacaggcggaaaacgctggagcgcagtgcattaccggaattcgggtcgacagactggtggtaaaagacggcaaggttattggtgtggaagctgatggcgacgtccttgaggccaaagcggtgattcttgctgatggcgtgaactccctgcttgcggaacaattgggaatgaccaaaccggttacagcagaaaatgtggccgtgggtgttaaggagctgattgagttgccgaaagaggtgctgcaaaatcgattcaatttgcgaggcagtgaaggagtggcctggttattcgctggtgcaccaacggatggattaatgggcggtggttttctttacaccaataacaccacactttcgctcgggctggtttgcgggcttcatcacttgaaagacgcaaaaaaatccgttccgcagatgctggaagatttcaaacgccatccggtagtggcgccgctgattgaaggcggcaagatgattgagtatggggcccacgttgtcccagaagcgggcctacgcatgcagagcgaactggtgggagatggtgtgctgattgcaggtgatgcggcgggtatgtgcatgaacctggggttcaccattcgcggtatggatttgnnnnnnnnnnnnnnnnnnnnnnnnnnnnnnnnnnnnnnnnnnnnnncagcgcaatgaagcgagacgattatagtaaaaagagcctcagcgaataccttgctctgcttgagggtggaccgttgcgggacatgaaaatgtaccagaaaatgcccgcgttcctcgacaaccctcgcatgttcacgcaatacccggaaatggccattggcatcgccagcgagttatttaccattaatggaaaaccacctgtgccgctgcgtaaaaacatccttaaacacgccaagaaagtgggctttatcaacttggtgaaagacggtattaaaggagtcactgcgctatgagtaagccagtcaatgtggatgtcaaactgggcatcaataaattcaacgtcgatgaacaaaacccgcacatcattgtgaaatcgcagcccgatatgcaggtgatgacgctattaaccaaagcctgcccggcagggttatataaaaagcaagaggatggttcagtgcgttttgattacgccgggtgtcttgaatgtggaacctgtcgaattctcgggctgggaagtgcgctggaaaaatgggaatacccgcgcggaactttcggcgtggaatatcgttacggttgattttttttgctcgcaatatgaaagatttttgtaataaaaaaggaaacgcatatgcagcccagaaaatatgatgatattcagttttcgtcagttcatcggcggatcatgctctggggcagtggtggcccatttttggatggttatgtcctggtgataatcggcgtggcgctggaacaactcacgccattattaaaactcgatgcgcaatggattggcctgttgggggctgggacgctggtggggttatttattggtacctcactgtttggctatatttgtgatcgcgttgggcggcgaaaaatgttcctgatcgacattgtcgccatcggacttatttctgtcgcgaccatgtttgtttccacacccgcagaacttctggtcatgcgggtattaatcggtattgttattggcgctgattatcccattgcaacctcaatgattactgaattttccaacacccgccaacgggcgtttgccgtcggttttattgcggctatgtggtatgtcggggcgacttgcgccaatcttgttggtttctggctttacgatatggtggatggttggcgctggatgctcggcagtgcctttatcccctgtttggtcattcttatcggacgttttgatctgcctgaatccccgcgctggctgttgcgtaaaggccgggtaaaagagtgcgagcaaatgatgttgaaactgttcggtgaaccgctgatatttgacgaagaaccgcagccggaaacgcgtttcttgcagttgtttagcaagcgacattttcccgtagtgctctttgttgccgtgatctggacctgtcaggttattccgatgtttgcgatttacacctttggcccgcaaatcgttggcctgctgggttgggatcaggggaaaaatgcggcgctggggaatgtggtgataagcctcttctttatgctaggctgcattcctgccatgtactggctcaatacgctgggccgtcgtccgctgttgattgggagttttgcgatgatgaccggcgctctggctattcttgggctggttgatcatttacaaattagcctggtggttattgcctttgcggtgtacgcatttttctctggtggtccgggaatattacagtggctttatcccaacgaactcttccccaccgatatacgcgcctctgcagttggggtgattatgtctatcagccggattggcgcgattatttcgatgtgggctttgccggtatttattactcgctatggaataaatacggtgatgctaatcggcgcatttatctctttagtggggttaattgtttcggttttatttgctcccgaaaccaaaggactttctttgaatgaggcggggaaaatgtcgctgacaagaaaatcatcgatgaaatgagatgatgattctttttctgactcgatttctatcatattcctgaacggggaaatttaaatcgaaccgaataggcctctaataaagtcatcaaatctattggcagtcatcagtactatgtgtgggaagaggtctagcccgatttttaatcggttatgggattttctgggacagcatagaattggctcctctgactggactcgaaccagtgacatacggattaacagtccgccgttctaccgactgaactacagaggaatcgtgtgaacggacggaatgataacggggtgcacgggggatgtcaaaggagattacgcattctgtgtttgtttgcttacagaatgcgcaactcgttgagcttttggcagatttatcccatggctgctcgtttcaagctcaaccgataacgataacgtccagcggtcagcaggaagtcctcgttcacgcttgggctccaggaatcatcaccgcccacgcccatatgctgggcatccagatgtaaccaggtaccgggctcttcctgcagcaaatgcacatggctgcaattcatcaactgctgtaggccgtaacggctgagcgagaagtggaagtgcccctcggcttgcaggttgccatagtgcaaccgttgcgtgtcgcaacgcaggccgttttcccctgggaaaatatagggtgtatgcaactgctccagcggtctggtccacagcccatgttgggcagcaagcttgcggtccgggtagttctcgtgcggccccaggcccagccattgtacctgtggatgcacctcggccagttggcaactgaggccgatacgggcgggagggggcagggcgtcggccaccgtggcatccacctcaacctgcacgctgccgtggcaatcgaacagccactgtttgcggctgtgtagcagcacctgctggttaaagctgaacgtatgttcagtcaccactcgcacgccgtcactcaacgcatcggcataaatctgtgtgcactgctcctccagttgatacatccccgccagcttccagcgctcgatccaggcgttagggtcgatacgatccacttcgctgatgccgatatcgttatccagcggtgcgcggatgaagctatcgcgtagcggcgtcagtagtgtggccttttcatcttgccaccactggctcaggcagccggaagcccgttcgaactgccagcgttggttgccgtggataatgtcaatctgctgctcgttctgcgttaactgcggggcaaagccgccgctggttggtggcgccagatgcaacgtgcgtggcaaacgccattgatcccaggcgcaacgatgatgttcttctgaccagtctgtggcatgaggctgtaccacctccacgttcagccacagctcgcctgggcggtggatcatcggcaacttatccagcagggtgaccgtggtgctgccctgtggcggcaggttgagcagcaggctaccgctggctcgttctacgccgtccaactccagacgccagttaagctgttcattgtcggttgcccggaacaggtattcgctggtgatggtgagtgccagttgctgggcatcaaactggaactggaaaaactgctgtgcgcgttgcgcttcgaacaatgctgggtgggggctgcgatcggggaagaccaatccgttgaggcagaactgacgatcgttgggggtatcgccaaagtcgcctccgtaggcccaataagcttggccgctgtcatctgtgcgggttaaggcctgatcgacccagtcccagacaaagccgccttgcaggcgcggatgcttgcgaaaagcctgccagtagcgatcgaagccgccaaaactgttgcccatagcatgcgcatattcacacaggattaacgggcggtgttcatcgggcatgccgatccactttttgatcgaccatttgggcaccgccgggaaaggctgatcctgatcgacgcgggcatacatcgggcacacaatatccgtggccgccgaattggcaccacccccctcatactgcactggacgagtaggatcctggcttttcacccagcggtacagtgcatcatgattgcaaccgtggccggactcgttgcccaaggaccagatgatgatgcaggcatggttgcgatcgcgctgcaccatgcgcgtaacgcgctcgctcatggcgggcagccagagtggatcgttcgaaagccggttcattggctgcatgccgtgggtttcaatattggcttcgtcgaccacataaaagccgtaacgatcgcacagtttgtaccacagcggatggtttgggtaatgggaacagcgcactgcgttgaagttatgctgcttcatcagcaggatatcctggcgcatggtggcttcatccatcacctggccatgttctggatggtgctcgtggcggttggtgcccctgatcaacaagggttgaccgttgagcttcagcaacccattgctgatggcaacctggcggaacccgacgtcataggcttccgcctctatcagttcaccggttggggaaagtaacaggatcacagcacgatacagctccggcgtttccgcgctccatagtgcgggttgttccacgggcaaacgcagagtcgtgcgatcgtcataagcgccgcgctcatcaataatttcactgccgaacctctgcgtctgctcgacaatcagggtttcattgcgccacagctgtacctgaacttgatgttgctggggctgattggtttgcacctccaccaccaattccccacggcggaagctgtcgctcagtggcgtggtgatatggatatcgctcaggtgagcggcgggtttatgcagcaggctgacgtcgcggaaaatcccgctcatccgccacatgtcctgatcttccagatagctgccgtcgcaccagcgcagcaccatcaccgccagccggttttccccgggttgcagcacagcactgaggtcaaattcggcaggcagacggctgtcttgcgaatagccgacccagtggccattgcaccacaggtaaaacgccgagttgacgccgtcgaaaataatgcgggtttgaccactggccagccactcggcatccacgctaaagctgcgggaatagcagccggtcggattatcttcgggtaccagcggcggatttaccgggattggatatttgacgttggtgtaaatcggggcgtcgtaacccgctagctgccagttggcagggacagctaacctgtcggcatccggcagatcctgttccaaccagctttctggtactgcctgaggccgcccgaaatagttgaactgccactcgccgttgagcagttgttggctcgggctggcagcatcttcccgggccgcagtggcatcacgccaactggcaaacggaggatgtgccggtagacgttggtaatgagtgcaggcagggttttgccaatcgcggcgggcgaggatttccgccagggtaaaacgggagttagcatgcatgtgggcatttcctgagccggttcaagccaaaaggttaagcgtttacatggctgacagcattacccgacggcgcgcgtttgcaaagcgatagaagagaagaagcagagcgagatcacatcagtgccgtaaatgcagtgatatcgagatgggagtaagggatggacatcgaaaaataccccgcccgtaacgacgagcggggggcaattcagcttactcgtcggcgaggacaaacatgccgaacggatggatttgcaggaaatagctgtcgcccggttcgggctgtaactgcgtagcgtttacctgcagcagcagcgactgatcgtgccagttcaccagcacctcatactgaggccccatgtaagccactttactgatggtgcagcgctggctcggttccccatgttggctgagggtaatcgcttccgggcgcacgcccacggtacattgctgcaaaccgggggcaaacccttgcgggcgcggcaccgggtagccaaagatctctacgccgctgctggttaccttggctgggaagatgttggcatcgcccatgaatccggccataaagcgcgaggccgggtaacggtacagcgtttgcggcgcgccaatctgcatgatttctcctttgttcatcaccagcacggtgtcggaaaccgcaaaggcttcgctttgatcgtgggtgacgtagagtgaggtgatgttgaactgctgctgcaactcgcggatcttctcacgcatgctgcggcgcaggttggcatccaggttactcagcggctcatcgaacagcagcaccttgggtttgaggattagcgcacgtgccagagcgacgcgttgctgctggccgccggagatctgatcgacatagcgctcttcaaacccctccagatcgaccagcatcagggcttcacgtacccgatcgcggatctccgccttgggtcttcccagcattttcaggccatagccgatgttatcccccagcgacatatgggggaacagcgcgtaggactggaataccatgcagatgtcccgctgctgaatggagcgatcggtcacgtcctcgccgtcgataaagatctgtccgccactgggtttctccagcccggcgaccagacgtaggaccgtggttttaccgcagccggaagggccaagcagcgtcaccatatccccacgggggattgccaggctcaggttttcaatcacggtgttgttgccaaaccgcttggcgacgtttttcagttcaacaaagtgctttttatcttgaatgtcagacatgttgttcatccttctccgccgggtatcaggccgcattccgggctttggaacgcgcgacccgcgcttcgccaaccagggcatcaaacaggaaaataatcgccagcatcactacgatcaggatcgatccgtaggcgatggccacgccatactcgccgtcctcgacccggttaaggatgtaggacgtcgcgacgcgcgtatctggcgtaaccaggaaaacaatggcgctcacggtggtcatggcacggacaaagctgtagaccaacgccgagaggatcgccgggcgcagcaagggcagcaggatatacactatggtgcgtagggaaccggcacgcaggcttagagaggcctcatccagcgacttgtccagttgccccaaacctgcgatacccgcgcggatccccaccggcacgttgcgcatcaccatcgaaatgatcacgatggctgccgttccggtcaggtaaaccggcgcgctgttaaacgccagaatgtaggaaacaccggccacggttcctggcaccgcgaaacacagcatggtgctgaactcgatcaccttcttgccttggaattgctggcgtaccacgatgtaggcaatcagcaggccgaaaatggcagtgatcggtgcggcaatcccggcatacagcaaggtgtcgatcagggaaggccatgcgccgtcgctgaagccttggccgaacagcttgctgaagttgtccagcgtcagcgtgtagtccacgccccagttaacggtaaagctgccgtagaaaatgctgccgtacagcaagatgttgaaggcgatccagacatacagcatcagcgagacgccccacaccagcgtcaccggcagcggctgaacgtcgccgtggttggatttgccggaaatggtcacgtaggaacgcttgccgatccacatgtattgtacgcagaacaccagcagcgagaacatcagcagcaccacgcccagcgtactggctgcctgataatcaagctgcgcaccggtaatgtagaagtagatctgcgtggccaatacgtcgaagttgccgccgagaaccaaggggttactgaagtccgccaacgattgaacaatgacgatcaggaacgagttggccagtgccggtttcagcagcggcataaacacctgggtaaaggtctggaagcggttggcgcgcaacgtgtaggacgcctcttccagcgacggatggatggtcttgatagccccatcaaggatcataaatgacatgggcgtaaaggccagcacctgggccaaccagatcccggtaaagccgtagagccagttggtattggtcaggccaaaccaggtcaccatcagctcggtgatgtagccggagcggcccatcatcagggtgacgcccaagccaaccacaaacggcggtgtgacgattggcaggatcgagaagatacggccaatcaccgccgaacggcgggcgatacgcgtggtataaatcgccagcaccatgccgaagaaggtacagccaatcccgacggccacggacagcaggaaggagttccagatcacctgcaggatatgcgcctgcccgagcgtttgcataaacgctaacggggcgaaggcaccggcctcatcggtgaacatcgggataaagatggcgatgctggggtaaatgataaacagcacaattagggcgatcaccgccaccagcgaaccgagtacgaagcgatcgccacccagccattccagccttgagagtgcaagggtgatcactgcgcccattgccaccagcagcggcaaggtagcgaaccccatcccggtaccggtcgcggcggcgctgataaatactaataacccacaggccagggcgtaaccggcatcaaacaggtggcggttgcgttgctcgcggccagtggcaatctgcgggcgcacagccagcagcagcggggcggcaaaccacagcacagccaggcctgcatgtgaccatccgtaggccgccagcagctcttcgctggtcgcctccagcagcccgtagtccaggctgtaggaaggcagtagggcgaaacctgccagcgccagcagcaaccagtagaaaatgggatcccgcccctgcgccgtgcgcaaggtgatggtttcagacatgatattccccggaataaacgaaaatgaagcgggcgtagagcctacgcccgatagatgctggatgggatcagtggcccatcttcacgtcgttaacccatttggtgatcagctttttacgcatgtcggaagcgccgtaggtatccatgtcgtaatcgatcagtttcaattgatccagcttcagcgagttaggggaggtctctgccgtggtattggtcaggatctggtaagactgacccttcttccaggaaagctcctgagcctcttttgacagtgcccaatccacgaacagcttggcgttttccatattgcgggcgttcttgaggatgctgatgccgccgatttcatagccagaaccttcgcacggggaaaccagagtcagaggggcacctttttctttttccagcgaatagtcgtgtaggaagccaatgccgatcgtggtttcaccgcgcgcggcgttgcgggccggggcgatgccagacttggtgtattgtgagatattgccgttcagctgtttcaggtaatcaaaggcggcttcttcgccccacaactgcgcaaaggtggccagtgcggtgtaggctgtaccggagctttgtggatcggcgatttggatctcccctttgtagatcgggttggtcaaatccttccagcacttgggttcaggcaggtttttctctttcagacgatcggtgttgacgccaaaaccgagaatgccgatatacaccgcagaggagtagttgcctttacgtttggccggatcgcggaactgcggcatgatttgcgccaggttcggcgaggcgtaagcctccagtaaatccatttcgccagcctgcgattgaggatccagcgtgccgccataccagacgtcagcctgtgggtttttcttttccgcgtctaccttggccagggtgctgccagagccgttgcggataaagctggtcttaacgtcgtatttctccccgaagactttggcttcttcctcgcacatggcgttggtggcgctgcaatagatcaccagacggcctttggcctgcacggttccggccagggcagtcagcgccagcgtggtggccagcagggtgttgagaggtgtcaatttcatggtgttgtcctttttgttgttgtctttgtagggtaaagcaaactaatttcccctcaccccaaccctctcccacagggagagggagctgatccggtgttgctattgggggcgaggatcaatctgtggcatttttttcctctggctccagtccctccgatctgacgtcagacgcagaagataatatgttgcacattcggtcccctcaccttgtgggagagggttagggtgagggggattgcaccgactaaaacccctcatcaccgtgtaaaaatcatgtcttactgttgccgtatctgcccggccatcaacagcggcatcaacagcaggccgacgcaggtggccgccagtgccagcagggcaaaaaagccataccagccgtaatgctgtaacacctgcgccagcggccaaccggccaacgcggctcccaggtaggcgaacagaccaagaaacccggtcacggtaccggcagcgtccttgtggcagtgctccgtggcggccagcccgatcagcatctgcggcccaaacacaaaaaagccgaggccgaaaaagcaggctgaaagcagcccgtaatggtgcagcggggccagccacagagcggtcgtcgtcacaaacaatccgatggagaacagcaggatcatcggtgctcgcaggccgcgaaacagcagatccgatccccaaccggcaaacagcgcgccaaacagcccacccagttcaaacagtgacaacgtggcgttggccttcatcagattgacgccgtggctctccgccagccagatgttgccccaatcgttcagcgcaatacgtatcaggtacaccaggatgtaggacacaccgagcaaccagatggtcggattgcgcaatatggtgtcaaacaacatccgccgcatcggcatcgcggggctttgctgctcttgccacagctccagcggatcgcgtcgccagtggcctacgctgggtaatccttgctgctgcggtttgccgcacagttgccagcacaaccacagcccaatcagcatcccgatggctcccggcagcaacagcgcagcttgccaaccgtagtgcgaagccatatatccggacagcaatggcacggccgcaccgcccaggctgatcgaagtattccaggtgccccaccagaagccacgctcgttgcgcgaataccaactggtgagcatcttggcgcagggcggccagccccagccctgaaagaaaccgtttaacgtccagaccaccagcaacgccgtcagcgaatggcaaaaggcaaacacgatgttcagcacgccggtgataaatagcccgacgcccataaaccagcgcgcctgactgcgatcgctgacgatgccggagacaaacttcgagccgccgtaggccaggtaaaacagcgtacccagcagaccgatatcccctttgtccaaccccagttcgagctgcatcaccggcatcgcatagctgacgcttttgcgtgtcagataaaatgcgccgtagccgacgatcatcgaaaacatcaggcgtggtcgccagtagcggtaacgtgcgctgatttgctctgcggttaacgtggccgatgccatgaggtcctccagacagtgagagcagtgtagggtgctgaaaatagaattggatgagacaaggttttaggcacctaagactaagtcctagtcagacggggtttttgttcagttttgtgggcaggttaacaattatgcgcgtgccattacgccgatggagccgccaatcgccccccagtgcgcgcacccgctcttcgataccgcgcaggccaaaaccgctggtgggttgcaacggcatgccctggccgtcgtcacggacttccagggtgatcgtttggtgggtttgcgtcaggcttaaatgcacatgactggcgcaggcatgtttgctgatgttattgagcaactcctgtgccacgcggtagagggtaaataccagggtttcatcatctggcgtggctggcaggcggtaatccagctggaagctgatcccctgttcggcaaaggaaaactcatcggccaggtggtgcagggctttgtccagctccatctcttccaacaccggtgggcgcagttgccgtagcagggtgcgggtcgtgtggtggatgcgttgtgacaacgaatcaatctgctccgcggccaggcgggtggctggggcggtggcgctgcggttcaccaacatcgcctggatctgaatggcggtaatattctggccgatttcatcatgtaactcgcgtgcgatggctttgcgcacctcttcttcggtacccaccagccgctccatcaggtgtcttttagccgccagctcttgttccaactgctggcgatagcgctgtagcttttgcgccaattgctgctgacggctgatggcaatccccaacccaatccccaacagcgcctgggtagaaaggaatagctccaactcttgcagatcctgaaacgcgccaccggcctggcgagtgagggtgatcatcacgctgccaaacagcgccgccagtacgcccccttgccagccaaagcgataagccataaacacgttgggcagaaagataaagatcaacagcagccgctccatctccggggcgatcgccagttgcacgcaaatccccatggtgagaaacagcgaacaccacagcagtagcgaggtgcgtagctgtggtgttgaggggcgcggaacgggcatcgacgtcaccagttgctggcgcaggtaggtataaatcagatagacgaaaggcaccagcagcacgccgccggtaaagctggtcagcaaggtttggctgatactggatggcagccagatccccgccaataacccacacagcagcgcattggcagcgatggccgccagcaatagcgatagccgttgccagtacaggtgatagcgataccacagccgctgagtggcccaggctggtagcaggcttaacaacggcagcaacagcaccgagcgatcgctcagcaattgctggtcatgcagccataacagcgtggcggcttccgccagtaacagcgtgagccagtaacgccggggtagcaggatcagcagcgccagccgcagcccttgaggaaacagcagtacggcctgttgaccgttatggctcaggtgcaggctaatggtccacagggccagccaactgagggcaaaaaacagcgccagaaacagcgaaagcgccaggcggcgcaccattggcggcaccggttaactcccggcaagcagttgatgttgcagtgcgaaatgcaccagttccacggtcgtgtcgcaatgcagcttgccgaggatattggcgcggtgcacctgtacggtcttatggcttaaggtcaactgttgggcgatggttttgacactcaggccgttgaccagcagatcgaagatctctttttcgcgcggggtgagtacctgcaattcttttggtggctgcggagtatggcgcagtgcccgtaaggcatccgcgcacaggtaaagcccgccgctgctgacggcgcgcaccgcctgcaccaattcatgggggccacagcgtttggtgagataaccaccggccccggcatcaatcgcgctttgcacgaaggcattggtgtcatagatgctgagaatgatggcgcgaaaggtggggcgctgttggcgtaaacgctggagcaggctgaggccgctttcatccggcatggcaatgtccagcaccgctacgtcgatcggatcgcgtagcaagtgcggccatgcctgtgctgccgagtcgaactgaccgacgatacggatatcctcttccaacgacagtaactgggcaaacccggatcgaaccaccacgtggtcgtctatcagcgcaacgttaatcataagcctgtaacaaagtgtgagattttccgcatcatgcgcaggaaaactctggctggcaactgttgcgctgcaaaatggaagggagttaacagattggcattaaaatggtctgccgcatcgacccagagtatccctgtaaccagcactgttattaccctcctgacggctatttttacgtaattcgcttcgtttctcccctctggagcatgacacccgtcgcaaaccgggaaggttgcaagtttgtccatataaatagcattcaaagatatgggggaaatcgctatcgaggctgtagagtccctctacggggatgttgtgcagatgtaaaatcagcatcccggtaaatcgtcactaacaataaaatataaataataccaatgtgttacctcgctattaggcggttatgcctcaacctacattagatccgggagtgttagatgaaaaaattgagtgtgaaaacgttattggcggctagcctgttcagcatgctggtgggctcgggcggtgcattggcgcaagaagtggaagtcgtcaatatctcgaaaatcgccggaatgccctggttcaaccgcatgggtgaaggtgtggaacgtgccggtaaagacttggggatcaaggcctatcaggttggcccatccagtaccgacgccccacaacaggttaagattattgaagatttaatcgccaagaaagtcagtgccatcagtattgtgccgaacgatgccgatgtcttggagcccgtattcaagaaagcgcgtgacgccggtatcgtggtattaaccaacgaatcaccagggcagcctagcgctaactgggatattgaaattatcgataacgccaaatttgccgccgacaacgtggaagaaatggcaaaagcgatggggggcaaagggggttatgtcatttatgtcggtagcctgaccgtgccgcaacataacctgtgggcagatttgtttgttaaatatcagaaagagcattatccggaaatgtttgaagtgaccagccgtatgcctgtcgccgagagcattgatgactcacgccgcactacactggatctgatgaaagcacatagcgacctgaaaggtattgtggccttcggttcacaaggcccaattggcgccgggcgcgcagtgaaagagaaacgcgcgaaaaataatgttcacgtgttcggcatgatgatcccctctcaggcagcctcgctggttaaaagcggtgatatcgccatgggcgtcacgtatgacccaggttctgccggctatgcactgactgccgttgctgacaaagtgcttaaaggtgagaagatcgaaacaggcatggagatcccaggggtaggtaaagcggaggttgatcaggataaacacctgattcagttccacaatgtattgcgagttaccaaagacaacgtggattccctgtattaattcccccgcatgaccgcagagccggatatcttgttcggctctgcaatcaatgcccgcctggagtaagaggatgtatgcagccatttattaccctggaaaatatcagtaaaaccttttatggcgtcaaggcgctgaataaggtggccatgaccctgttaccgggtgaggtacattgcctcgctgggcagaacggttgtggcaaatcaacactgatcaagattatctccggtgtttaccaacccgatagggatgccgccattattattgatggcaaaacctattctaccctgacgcctattgagtctgtccgcctggggatccaggtcatttatcaggatttatcattattcccgaacctgaccgtggctgagaatatcgccatgaaccattatcaccatcagctgtgggtgaataaacgtcagatgcgggagacagccgaacgcgtcattaacagcattgatgcccaccttaatctggacgaattggttgagaatttatctatcgcccagaaacaattagtcgctatctgccgtgcgcttgcgcaagatgcccgccttattgtgatggacgagccaaccgcgtcgctgacccggcaagaagttaacggcttgctacgggtggtgcatgaactgaaatcacgtaatatctgcgtggtatttgtgagtcaccggttgagcgaagtactggagatttcagaccgtattaccgtgctgaaagatggccagtgggttggaacctaccccgctgctgaagtggataatcaacggctggcctggttgatgacggatatgaaatttgattttcaggtgctaccgccttacagcgcagcgcacccggtcgtgttggcagtagaagcgctttcccgcggcaacgaataccagaatatctcactggctttgcatcctggcgaaattgtcgcgctggttggtttgctggggtctggccgcacagagctgtgcctcagcctatttggtttaacgaaacccgagtcgggcagcattcgtatcaatgataagccagtgcggttcgccagtaaccgcgacgctattgccgccggtgtgggctatgtctcggaagaccgaatgagcaccgggctgattatggagcaatcaatccgcgacaatatcagtgccacggtattacaccggcttaaaaatgcctttcacctgatgcgggccgagcgagtcgacaccctggtcgaagacatggtgaaacacctgtcgatcaaaatcggtaatagcgacttgccggtcaatacgttatccggtggaaatgcacagcgcatagccatcgccaaatggctggcaaccgacccgaaaatactgatcctcgactcgccgaccgttggggtcgatatcgccaacaaggcaggcatctataatattatcaatgcgttggcggctcgtgggattgcggtgttaatggtttgtgatgagattgatgaagcttactttaatagccaccgtattatcgttatgcggtctgggcggcttgtgcaggagttcttgccaagtaacagcagcgaagctgccattgcggaggtagtcaatggctaatccccatgtactcaataaatctgatgtaggaaaaacaggcttattcaataaagagcatctgaaacgccatgaagttatgttggcttttaccatattgattatttcgacttatcttgctttcaccagcccagaatttctgacgctcgccaatatttatgacttgataaataactacgccatgctaactattttggcgtgtggtttttttatcgttttgatttctggcggtattgacatttcattcccggcaatgaccattatctcgcaatatgtcatggtgacattcattgtgaagtttggtggtaatttcccggtggctttcgcactggcgggaggcatcggcttgttgctgggggtgatcaatgcgctattggttaatcgcctgcgggtgccgtccatcattattaccatttccacgctgaatatcttctacggattgctgctgtatctcagccggggtgtctggctgtatacctatccagaatggttcgaacatgggcctatgctgttctctttcaccgccgctgatggctatgactatggcctttctctgcccattttgaccttgctggcgacgattatcatcactgccttggtgatgactcgcaccagcattggccggcaaatttatgcgttgggcggtaatcaggaagcggcatcccgcatggggttcagcattgttaagctgcaactgtttgtttatggctatatggggtttttatccggtattgccggtgtggtgcagtcctataccgtcttgacggtggcaccggactcgttgctcggttatgaactcaccgtgctggcggcggtggtgttgggcgggaccagtattgtcggcgggcggggtaccctaaccggtactctgctcggggtgatcctgctggcaatattacaaaatggtttgaatttactgggtatttcgtcgtactggcatagcgtggtgatcggtctggtgatcgtcatcagcatcagtgtgacagcctggggccaacgtcataaggtagggatataaccatgtcgaaaacaactcaacgtgatcataccgagcgctggttagtggcactgttggcgctggtggcgggcgtgttcagtgtgctgatcccacaggtattctggtctgcggccaattttcaatccatcgcctcacagatccccgtcgcggggatattgacgctggcgatggcgatcaccatgctgaccggtggcatcaacttatccattattgccactgcgaacgccagtgcgttggtgatggcctgggtgtgtacccatcttgagccaacgttcagttcattgatagtgatgctgttggcgggagggtcggttgccttggcggtggggatcatcaatggggtgcttatctcggtggttcgggtatccccaattctggcgacactgggcatcatgaccttgctcaaaggggtgaacgtgctgatctccaaaggctcggcgatttctaactttccgagctatgtgctggcattggatcgcagctatttccttggggttccagtcccgctttatctgtttgccgtagtggcgttgctgctttggcttatgttggccaaaaccccgctgggccgacagatatacctgtccggctccaacgaaaaagccacctttttctctgggattaatacccgccgcacgctgatttgggtctatgtcatttcctcgttactgtgtgccgtcgcggcgttgctgatgatgtccaaactcaactcggccaaagcctcctacggtgagtcactattgcttatcactatcctggcgacggtattaggcggggtaaatcctgatggtggatttggcaaggtgttcggcattgtgctagcgctgttcctgttacaaatgctggagagcgggctaaatatcatgggagtcagtagctatatcaccatggcactgtggggatcgctactgctggcgtttatctttgtcaaaggtgcaaaagtcccagcattgcgtttcttaaggcagaacaagccgttgcagtgatagtgcaagttcaccaaactggttcgacagccccaggagcagcccactacatcacggtatgttgggcgctcctgtttagccattgcttgcagaacgatagatccgctggggcctgcccactttgccgtaaataatctccgccactaattgatcgttggcgctgaaaaactccagataacgccgggcagtggtgcggctcagcccgatctgttgtgccacgctttccgccgtatggcgcacctgcggatcttcgaacaaagcgcggatcttcatcagcgtcagctcatcaatgccggtgggcaacgcggtctgatcgccaccgcgggcgtaggtattgaacatctcatcgatacggcgttggttgacccgcgcggtgtctttcagcgcttcgcgccgttggctaaagcgttgcagggtttgcgccaggcggtcataggccaggggtttgatcaggtaatcgaacacgccatagcgcagcgcttcggccacggtgtccatatcgctggcggcggtgataaacacaatgccaccgccgtagccttgtagcgtcagctcgcgcagcagttctatgccctgaccgtccggcaggaaattatccagcaggatcaggtcgggtttaaaacgttcggtcatcgtacgtgcctgtgccagggtgcccgccagccaaatctgccggcacccgccattctgcttgatgaattccgcatgcatttctgccaacggcgtttcatcctcaacaatcagaatatttagccattccatgttaattccccgtagcttaattacgctgctaattaaatgtcatcgagatggttatttaattaaacactatgtcgctaataaaaactataaaaataattaagtaaataaaaatcattaaacaacttatttactgcgggtagattgtgaaataggtcaataatcagagcgttatttgtgtttaacatggcgccattaaataccccgttcgcgttatagaccatttcaacttgatggtttttaaggtttttattacgccttgatgttaactctaatgggattttgtatttcaaatgttattgataagttattttagagagactgacatgttgggcgataccgtatttaatcgggtgaaaagatcggatcacaaaaatatagcggcaattaatgcttttttgcgaagtaacgatctgaatattgataccacggtcgaggtttttatcaccgtgacccagggcgagcaattggttgcctgcggaggtatcgccgaaaatattatcaaatgcgtggccatcagcccgcaaatgcgcggtgaaggcttggcgttatcattggcgaccgaactggtgaatctggcctatgagcgccatcacacccagctgtttatctacaccaaagtgcagaatgaggcgctgtttcgccagtgtggtttctacccgattgccagcgtgccgggcatcgtggtgctgatggaaaacagcccgtgccgcctgaagcgttacgccgcacaactggccagcgagcgccagccgggcgacaccattggcagcatcgtgatgaatgccaacccctttacccgcggccatcaatatctggtgcgggaagctgccgcccgctgtgactggctgcatctgttcctggtgaaagaaaacacctcgcgcttcccgtatgaagatcgccgcaatctggtactgaagggcaccgaggggatcaccaatctgacggtgcatgatgggtctcaatacgtgatctcccgcgccactttcccttgctacttcattaaagagcagggggttgccgacgactgttacaccgaaatcgatctgaaaattttccgccagtatctggcccccgcgttgggcatcacgcatcgatttgtcggcaacgaaccgttctgcgccgtaacggcgaaatacaaccgcgacatgcgttattggctggaaactccggcgctgcctagcccaccgatcgatctggtggaaattgagcgcttgcagtaccagggcacggcgatctctgcctcctgggtgcgcaagttgctggctgcgggagacttccacgccgccgcgcctctggtgccgaaagacacgctgtactacctgcaggatctgcaggcacagcgccgggccaagccagtaccgcaagaatttgagtccgcacaatcaggtgaatgatgaaaataatccgagaagcaatggccggcacgctggaatccagcgatgtcatggtccgtatcgcgccagcagaaggcccggaacacgatctgctgattgccagcagcgtggaaaaacagttcggcgatgccatccgccacaccctgttgcaggttttgcagcagtacgacgtgccgccggtgcaggtgattgtcgacgataaaggcgcactggactgtgtgctgcgtgcacggctggaaaccgcgctgatgcgtgccagcgaaaccgccacgctgccttgggaggaacgccgtgaaaacgctgaataaacaccgcatgcgccgcagcatgctattcgtaccgggggcgaatgccgccatggtcagcaacgcttttatctatcaagccgatgcgttgatgttcgatctggaagactcggtgatcctgcgtgagaaagacgcggctcgtcggctggtgtatcacgcgctgcaacacccgctgtatcaggaagttgaaaccattgtgcgcgttaacgccttggattcggcctatggcctggcggatctgcaagcggtggtgcgtggcggagcggatatcgtccgtctgccaaaaaccgacaccgcgcaggacgtggtggatatggagcgtgaaatcgccgccattgaacgtgcctgtggtcgcccggtcggcagcactggcctgctggcggcgatcgagtccgcacagggcatcaccaacgcggtggcgattgcgcaggcttccccaaggttgatcgggattgcgctgggtgccgaagactatgtgcgcaatctgcgtaccgagcgctcgccggaaggcattgaactgctgtttgcccgttgctcactgttgcaggccgcccgctcagccgggatccaggcgttcgataccgtctattccgatgccaacaacgaagcgggtttcctacaggaagcggcgctgatcaaacagctgggctttgacggtaaatccctgattaacccacgccagatcgaactgctgcacaacctgtacgcaccaaccgccaaagaagtggcccatgcccagcgagtggttgatgcggcagaagcggcagaaaaagaggggcgcggcgtggtttcgctgaacggcaagatggtcgatagcccggtgattgaacgggcccgtctggtactgcaacgcgcagcgctttccggcgtgcgtgaagaaccgaaccacagcgaggaagcatgatgaaacgccaacaacgcctgatgaccttgaacaatcacgccgagatgcggctttatcaggaagcctccaaggccaacctgcaggcgcgtaaaccgcgcgacatcaaacgctgcgagtcgctggaagtggcgatccgccgcagcggcctgcaggacggtatgaccatctctttccaccacgcattccgtggcggcgatctggcactcaaccaggtgatggatgtgctggcgaagatgggcttccgcaacctgacgctggcctccagttcattgaccgattgccatgcgccgctggtcggccatattcgcaacggggtggtgagccgcatttatacctccggcttacgtgggccgttggcggacgccatttcgcgcggtctgctgaaagagccagtgcaggttcactcgcacggtggccgggtcaacctggtcgagtcgggtgaattgcagatcgacgttgctttcctaggggtaccgacctgcgatgagttcggcaatgccaacggttataccggcgatgcctgctgcggttcgcttggttacgccaaggtggatgccgctgcggcccgtagcgtggtgctgctgaccgaggcgatcgtgccttatccgcatcatcccgccagtctggcacaggatcaggtcgatctgatcgtgcagttggagcgagtaggggatgcggacaagatcggggcagatgctacgcgtatgacctccaacccgcgtgagctgctgattgccancgccgtgctgccgaggtgatcgttgactcaggttacttcaccgaaggtttttccttgcagaccggcaccggcggcgcttcgctggccgtaacgcgcttcctggaagacaagatgcgtgcccgtggcgtccgcgccggttttgcgctgggcggcatcacttccaccatggtggatctgcatgagaaaggcctgatcggcaaactgctggacgtgcagagctttgaccgtgcggcggccatgtcattggctcgcaacccaaaccatatcgagatcagcgccaatcagtacgccaacttcagctccaagggcgcgtcggttgatcgcctggacgtagtggtgctgagtgcgttggaaattgacaccggctttaacgtcaacgtgctgaccgggtccgacggggtgatccgtggtgcttccggtggccactgtgataccgcagcggcggcgcggttggcaattattgtcgcgccgttggtgcgtggccgcattcctacgctggttgagcaggtgaccacctgcgttacgccgggctccagcatcgacattttggtgaccgaccacggtattgccgttaacccagcccgcccagagctggcgcagcggttacgcgatgctggcctgcaggtggtcaccatcgaatggctgcgtgagcgtgcgctggtattgactggcgaaccgaaaccgatcgcctttaccgacaacgtggtggccgtggtgcgctatcgcgacggttcggtgattgacgtcgtacatcaggtcgcggagtaacgccatggcttacatctcccccgaattggccgccagccgcgccgtaagtttgcccgaactgctttccagccgtgaatgccggcaggcacggcaacaggcgtggctggcgcgccatcctaccgccacgctggtggtgctcactctggtggtgccgggggcggtgaaagacagccccatgacgcggcgcgtgttcaacctgggcaggcaggctctgcagcagatgtatcgccagcaaggctggctttgtttgcagcagaagaccctggcgctgcccactggctgcgaaggctatctggcgctgcaagccgatgctcgcgcggtgaaagaggccgccattcagctggaaatccagcagccgattggccgcctgtgggatatcgatgtacttaccccgcaaggaaagatcctgtcgcggcgcgaacttggtctgcctgaacgcaactgtctgctgtgcaatcagccagccaagatttgcgcccgccagcagagccacagcaccgaacaactgctcaatgcaatggaaaggatgctcgatgatgcactcccagcctgattggcagccgacggttacagatctttcgcacagccagcgctttgcccgcgacgcctatcgggcgctgttggtggaggtcaacctgacgccgaaaccggggttggtcgatcgccacaacaacggcgcacatcgcgacatggatattggccatttctatcgcagctcaagggcgattggccggtggctaccctattttatccgccagggtatggccgacgccgctttgcctgccgagcagcagcttgcacgcctgcgcccattgggcatggcctgcgaagaacagatgtttcgcgccaccggcgacatcaacacccataaaggcagcgtgttctcgctagggctgttgtgctgcgcccttggccgcttacagcaacaacaacggcagattgacgcgcaaagcctgtgtgacgaagtggcccagatgtgccgtgggttggttagccgagagctgcaacgcaataacgcgggccagacggcagggcaacggttatttgccgagtttggcctgagcggtgcccgtggtgaggctgaatccggctttcagcgggtgattggcggctcattgccgctgtatcgccagaggatcgccagtggttgtggcgagcaggtcgcgctgctggacagcctgctgtggctgatggcgcataacgatgataccaacgtcgcctcgcggggcggcatcaaagggctgcgctggttacaacactatgccagccagttattggcacagggaggggcagggacggcacaaggaattgcccgtctacggcagttcgacgttgcgtgcatcgcccgcaatcttagccccggcggcagtgccgatttattgatagtcacctggctgttggcgcagttgccgcagacgggggcttaaaaaaataacgaagccttcaggagaagtgtccatgtccgaaaccaaagagaaaatctggaaagcgatcgccccgttggtggtgcttgccgtcctgttaatgatacccacgccggagggcatgccaccgcaagcctggcgttactttgccatctttgtggcgatgatcgtcggtatgatcctggagccgatcccggccacggcgatcagctttattgccgtgaccgtcagcgtgctcagttccaactgggtgctgtttggtgccgaagagctggccaatcccagttttaaagccggtaaagaggcgcttaaatgggggctggccggattctccagtaccaccgtctggctggtgtttggggcctttatcttcgcgctgggctatgaggccaccgggttagggcgacgcatcgcgctgttcctggtgaagttcatgggcaaacgcaccttgacgctgggctacgcggtggtgatcatcgatatcatgttggcgccgtttaccccgtccaacaccgcgcgtaccggtggcaccgtattcccggtggttaagaacctgccgccgctgtttgattccttccctaacgatccttcctcacgccgcattggtggttacctgatgtggatgatggtggtggggaccagcatcagctcctccatgtttgtgaccggtgcggcacctaacgtgttgggcatcgagttcgtcaacaagattgccgggatcaatatcacctggatgcaatggttcctggccttcctgccggttgggctgctgctgctgatcgttgcaccgttgatttcctactacctgtataagccaggcgtaacccacagcaatgaagtggctggctgggccagtacggctctgggggagatggggaaactgacccgcaaagaatataccctgatcggcctggtgttactcagcctgtgtctgtgggtgttcggcggtaaaattttggatgcgaccacggtgtgcttgctggcggtatcgctgatgcttgccctgcacgtggtcagttggaaggatatcaccaaatactccagcgcctggaataccctggttaacctggcaaccttggtggtgatggccagcggcctgagccgctccggctttatcgactggtttgccaccaccatgagcacccatctggacggtttctcaccgaagatgacggtcgtcctgctggtactggtgttctactacgcgcactatctgtttgccagcctgtcggcccacaccgcaaccatgctgccgatgatcctggcggtaggtaaaggcttgccgggcgtgccgatggaacacctttccatcctgctggtgttgtctatcggtatcatgggggtattgaccccgtatgccactggcccaggggtaatcatctacggctgcggctatgtgaagtcgaaagactactggcgtcttggcggtatcctcggcgtggtgtatatcgcggcgctgctgttgatcggctggccaattcttagcctgtggtattaagttaatcggcggccatccacggatggccgttacaaaccgaaactgatttacaatggtaggggcgctgcatgctgcgcccgctttgctgtatgttgtccccgtttcacttcgtcaccaatctggtcagccgtcccttcctccgtgacgcccatcacacactttcatgtcgaacgccgtcattatacaaatccaacgttaacccactcaaaacatacccgtcgtctttcaagttgcagcgttgttacctgcactatctcgccccagtcacttactaaacgtaagctcctggggatgagatagcttgtcgcctagctgcaacttgaaatccatagggtaaaatcatatttagggaacctctgcggatgagaaaaaaaacgttattactttgcctgcctttgctgttcagcggcaccgcctttgccgagaacgacggttatcaactggaacaggtgctggtaatgagccgccataacctgcgcgccccgctggcgaacaacggtagcgtgctggcccagtccacgccgaaagcctggccacagtgggatacgccaggtggcttgctgaccaccaagggtggcgtgctggaagtgtatatgggccactatttcaacgcgtggctcaagcaggcgggcattttgccgcaggaaggttgcccggctgctgacagcgtttacgtgtatgccaacagcctgcaacgcacggtagccaccgcgcagttctttaccaacggcgcattccctggctgcgacatcagcgtgcatcatcaggataaaatgggggagatggatcctaccttcaacccgattatcaccaacagcagcgaaacctttaatcagcaggcgttgagcgccatgaatgccgagctggcatcgctgaagctggacgcctcctacaaacagctcgagcagatcatcgactacaaagattctcctgcctgcaagatcgacaagcagtgcaacctggccactgaaccgaataaaatgagtgcggtaccggggaaagagccaggcgtttctggcccgctgaaagtgggtaactcgctggtggatgcctttatgctgcagtattacgaaggcttcccgatgaaagacgtggcctggggcaagattgtgacgccgcaccagtggcagcagttggccaagctgaaagatggctatcaggattcgctgttcacctcgtcggtcgttgcccagaacgttgccaaaccgctgctgacctacatcaattcggcgctgatcagtgagcgcaaggcagattctccgaagctgaccgtgctggtggggcatgattccaacatcgcttccttactgtcagcgatgaagttcaagccgtatgaattgccgaagcagtatgagaaaaccccgattggcggcaagctggtgttccaacgctggcatgatggcaaaggcgatcgcgatctgttgaagattgagtatgtctatcaatcaaccgaacagttgcgtaatgccgaaccgctgacgctaagccccccgccgcagcgcgtcaccctggcgctggaaggctgcccggtagataaagacggcttctgcgcctggagcgactttgaaaaaaccatgaaggacgtcttgcattaaccgtgctgccggggcgaaccgtttcgccccggcctgccgcgcggtatatactgtctcaacggaccccttatcacggatgaaacgtgctctcttcttttattctcaatgctgaattattgccggttgacggctttgctggcctgatcgcgcaatgtcacttctctgtcgcggattatcacgacgatctgtttgctgccgccggtatcgatttccctgcgcatgttgtgccagcggtcgccaaacgtaaggcggaatatcttgctgggcgctatttggcgcgctgggtgctggcagagttggggcatcaggattttactttattgcgcggggagaagcgtgaaccgctctggcccgctgggattgccggggcgatcagtcacaacagcgatacagcgctgtgcgctgctcagcatgagagtggggcaggtggcgtgggtattgacgtggaaacgcagatcccgcctgcacgagcagaagagttgtggagcggcatcgtcaatgaggacgaatgccagtggttacgccaacggccacaaccctttaatctgctgttgacgctggtattttccgccaaggaaagcctgttcaaggcgctttacccgcaggtgcgccgctactttgattttatggatgcgcgggtgacccagctggatatgcaggcgcagaccttcgagctggaattgcaaaagacgctgacgccgctttgccactcaggccgccgctttagcgggcgtttctggctgcaaggtgacgctgtcacaacattgatttatttttaaaatcagtgtgttacttccttcggtgtcgtagcagatggcgtgcaccttccagtaccagcagcatgaccgccagccagatcgggagataggtcagccactggttggcgttaatggtttcacccaacagcagtgcgacgatcaccaacaataccggctctacatagctcaacaggccaaacaggctgaaagggagcaggcgactggccaggatatagcacaccagcgccagcgcgctgataatgcccaacagcgggatttgcaaatatagcagcggtttggccgtcagcgccgccagcggttctgagccaccaagggcaaacagcgcggcaaccggcagcatcagcgtcagctcacaccacagtccgcccaaatgatcggtgcccaagcggcggcgcagaataaagtaaacgggatagcctaacgcgactaccagcgttgaccaggaaaccccgcccacctggatcagctcattacccacgccaaccagtgcacatagggccgccatcttttgcagcacagacaggcgatcgcggaaaaacactcgccctgccaacaccatggtcagcggcaacaggaaatagccgagtgagacatccagcgccataccgtgcagcggtgcccacaggaatagccacaactgaactcctagtattgaggtggtgagcagtaacaacagcacgcgatgcgggcgctgccgtagccagttcagcatctctttcacccgcacccagtcgccggaaagcagcataaacagcgtcagaaacggcagcgtcagcaaggtgcgccaaccatagatttcctcgccgtcgagtggggttagcattgaggtgtagtaatacatcacgccgaacagcagggaagcgacgacggaaagtatgatgcccttgatcaccagcgttcctgattattaatggaatttcctgcggctactctaaggttatttagctctaacaacaatgaattacgccggactggacaacaacggccaagcggttagaattacacctgtgtatttatccaggtaaaggcgatgacaatcgatctgtttgaagatgcgctgccgccgccctggcgtgaggaaatcgcgccgggggcggtggtgttgcacggttttgttcgcgagcacgggccggaactgctggcggcggtcaacggcgtggtggcacaggtgccttggcggcatatgaccacgccgggcggtttcaccatgtcggtggccatgagctggtgcggcaacggctggaacagcgacagtaatggctaccgctattcgcagcgcgatcccggaaccggcaaaagttggccagaaatcccggcaattttgctggctttggccgatgaagcggctttgcaggccgggtttggtcattacgtcccggattcctgcctgatgaatcgctacgatccgggcagcaagctttcgctgcatcaagatattgacgagcatgattttacggcaccgatcgtttcggtatcgctggggctaccggccgtttttcagtttggtggcctgcaacgtagcgacagaacgcagcgtatccctctggcccacggtgacgtggtggtctggggcggcccgtcgcgattgtgtttccacggcatcatgccggtgaaagagggttatcattcactggtggggtcacaccgcatcaatatcaccctgcgcaaggcgctttaacgcgggttcctggcctaaactggccaccagatagtcaataaatacccgcaacttgggggggagatgctgagttggggcatatagtagccacagatcgccatgatagctgctgaggaaatcccattctggcaacacctgcacaatctcaccgctggccagcgcctggtgggcggtaaagtagggcagactgccgataccaatatgctgtttcaccgcgtccaaccgaacccctgtgtggttggcggcatagcgcccccggacattgaccgaaaccgtcttgccgttgcggcgaaaacgccagcgtgcgtcgctgggcgtctcccccagataaatgcagctatgctccgtcaggtctcttgggtgacgcggcgtgccctgctgggccaggtaatgcggagtggcgcagagcaaatgttcgatggtcatcaacgggcgaccgatcaggcccggtgacgggcggtcggtgatgcgcagtgccagatcgacccgatcgtcgatcaaatccatgtagcggtcttccaaccgtagatgaacatccacctgcggatagcgctgcaagaacgccggcatgtgaggatgcagaacaaagtgcccgacggccttcggcacgctgacgctgatcgtcccttccggctctgagctgccctggccgctgatggtcaacactgagttggcggcatccagcatgctgcggcagcgctgaaaaacggcctccccttgctcacttaggcgcagtttgcgggtggtacggtgcaacagccgtacgttcagcgcttgttccaacctggcaacgctgcggctggtggcagaaggggagctgcccaactggcgggcggcggcggagaagctgccgctttccaccacctgaacaaaaacggccatttcaaccagcagtgcgctggaaagatttgtgctcatggcgcaaaggtccattgtagtgaagacggattatcagccgattatggcacgaatataataacggcgttaaccaggagagagcccatgaccgaacgactttattattatcacgatgatttgcagctccaggcacgggtattgtcctgcacggcgcaagaggatggcagctatgcggtgcagttggatgccacactgtttcacccacagggcggcggacagccaagcgatagcggcacgatcggcggcgtagcggtgttacgagttgccgtgcagggcgatcaattcctccattatcgggccgagccgttgccttgtggcctggtcacgctggagatcgacggtgaacaacgtcaccagcatacccgttggcattctgccgggcatttgattggctggctgggggagggccaaggctggcagccggtgaaagcccaccactggccgggggaagggcgtatcacctttgcgccgggtgcgcagacaacagtgttggaacaggaatacttgcagcaacggctgatggatttgatcgccgccgatttgccacgaaggcagcaagagcagcaaggcgtccgccaggtcgggtttggcgatctgccagcttatggctgcggtggcacccatgtgcgttcgctggcggagttgggcaaggtgcaaatcaccgccgtcaagatgaagaaagggcagttgattgtgcagtatcaggtggagtaaatcggagggcaaatattgccctccgcagggcattaaatcagaacttgatctgtactttgcaagataacgttttatctgcggcggcgatcagggcatcttcgattgcttcgggagcatattccccgctgagtaaggggagtgggttgatgcggccatcttgcaaccaggccactgcggtggcgaactcatcgataaagcggaaggaaccgacccagcggatttctttcaccagcattggcataaccgggtattctacgctggcggcccccataccaacctgaactaccttgcctgccgggcgagtcaaggcaacggttgaggcaattgccgccgggctacctgaggcctcaaacactacgtcaaaataccctctgttggcttgatagagctcactgctaccgttctccagcgggttgaaagtggcgcttgcccccatggccaaggccagttccagacaacgggggctgacgtcggaggcgacgatctctgttgctcccgcagtgcgggctgcagccatgatcaggcaacctatcgggccagctccgatcaccagcactttcttgccaaccagtggcccagccacgttcaccgcatggatagccaccgctgtcggttcagcgaatgccatcacctggggagtaaccttatcgtaagggatgcactgcgcctcggttgccgtcacgtattcagagaagccaccgttaacgtgtggattaaattgagcgctgcccataaaacgcatggaagagcagaggttttgctggccggagaggcaatattcgcaggcgttacaaggctgtgatggattgaccgccacccgttgaccaacgcgcaatgcagaaccggtaggggcttttgtcaccacgccaacaaattcgtgccctactaccatagggtgcttaagcactgacattccggcgcggccatgctgatagtaatgaatatcggaaccgcaaatccccccacactcgactttgaccagaacctcgcgatcgctatattccagttcacgctgtgcgacacggacatctttttcaccgaacgcgaagcaggctttgcaggtgattttctgttggttactcatgttttgggcctcaattagagttcttgcgcggtgcgctgtgggaggtttttttcagctttgggcggaacgatcacttcgatttttcccaccaggaaggtgtaggccagcaggccagccagcgcgacggcggagatataccacatcgcatactggaagttgttggtacgttgcaagatcacaccgatcacgattggactgacgataccggagagattgccgcagatattcagacagccgcccatggtgccgataaagttacggggtattacatcgctccataccacccagccaagattggagaaggcattggcgaagaaggcaatagataggatagcgatagcgataaccggccgatcctcaaagaaattgaccaggcagatcaccatggtcaggcataaaccgctcattaccggcaacttacgggcaaaagtccgtgacttgccttttttcaatagcatatcgctcagagttccgccgcacagtaccccggccatcgccatcaggtatgggaaggaagcacccagaccggctttggcaatggacaggttcaggcctttttccagatagacgataaaccaggtcaggaagaaataaagggtagacgagcaggcgaactgggcgataaacaggccccagatggtacgattcttcaggaagaagctgatatcgctccaacggactttctcactgacgttggcctggtttttcgagccgtagccacccccttcgcgaatgtaatccagctcctgttggttggtgccatgactatgctgaggatcgcgatatttcagtaaccaataaataccgaacagaatgccgacgccgccagacagatagaacgacatttcccagccatattccgcaacgataaacgacagtgctggggttaacagcgccaggccgatgtattgtgcgctggagtaaattgccgttgcccgtgcccgttcatgatcggggaaccaggtggcgataattttggtgttggaagggaaggagggcgcttcagcaataccgattaatgccctacaggccagcaacatcaggaaggacgccgttgccgtagcgaataggtgatgcgaggcaaaccccatcaggaaggtgaagacgctccacagaataatggcactaccgtacagaatacgtgagccgatacgatccagcacgtagcctaccgggatctggctggcggcatagaaccaggtaaacatggaaaatagcaggccaagctgggtggagctcaaatcaaattcggactgaattttactgccagcgacggacaggttggcccggtccatataatttatcgccgttacaataaacaacagcgacagaataaagaatcgcgactttgttgctttcattttattgtcctggtcagttgttgattctacaaacagccggatacagcagtgctacccacaaccttgagttgtgggtaaaagcacttacaagtcgaatgtagaacggttacagcacggctaaccaaccgccatcgacgtagatgatctggccgttgatatagtcggaagcggcagaagagaggaatacggcggtgccaatcagttcttccggcttgccccagcgttgagacgggttgctggctttgacccaggcatcgaacgttttattttcaatcagcgcggtattcatgtcggtgaggatataacctgggcctatcgcgttggtctgaatattgaattcggcccattcggcggccatggcgcaggtcagcattttgatgccccccttggccgcggtgtatggggcaacggtagggcgtgctgcctggctggtgagtgagccgatattgatgattttaccgcctttgcctcgggcgatcatacgttttgccgccgcgcgggacacgataaatgcgctggtcaggttagtgtcgatcacccgttgccactgttcgagttccagctcaaccatgggcttacggtattggataccagcgttgttgatcaggatatccacccgcaatccctgttgttccagagcggcaaaggcgttttctaccgcctcttcattggtgacgtcaaatgccacaccgtgcgcctggtaaccttggtcgcgtaacttggcgaccgagccttgcagcaactcttcgcgtatatcgttcaggatcacgctggctcccgaggccgccagaccttccgcataggcaaatcccaaacctcgggcggaccccgttaccagtgccgttttcccagtcaaatcaaatagtgcagcagacatagcaaatcctcattagtggtcttatcaatggacagtgtcagcttgtatgacatcattcatatttaaactgggttatggcggagtttaaatcaatgcgcttgagtgttttttgccatgaagatcacaaaacattattttagtggattatttttctattataaaacagttatatgatggcgttttgacgagctttgtgtgctagcgcacaaaatcaaatctgtttggttgggtaaaaaaatattcggtgatataagtgaaataacttgtaggacaaccattgagttggtagatctgactggtcttagtggttcgccgtaaagcattggcggccagttatgaatgatgaagttaacagctcaggcttttaaattaaggagttactgtgagtaatctaagaatcactgcggtgaaaaccattctgacggcaccgggcggcattgatttggccgtggttaaagtagaaaccaaccaaccggggctttatggcctgggatgcgctacctttacccagcgtattcacgcggtgaaaactgccattgatgaatacatggcaccgtttttgattggcaaagatccggcgcgaatcgaagatatctggcagtctgcctgcgtgagcggctattggcgcagtggcccgatcatgaacaacgcactatccggtgtggatatggcattgtgggatatcaagggcaaattggcaggcatgccagtgtatgagttgctgggggggcaatgccgtgacggcatcccgctgtatgtgcataccgacggcagtgacgaatttgaggtggaagataacattcgtgcccgtatggaagaaggttatcaatacgtacgttgccagatgggcatgtatggtggggcgggaacagacgatctgaaactgatcgctactcagttggctcgggccaaaaacatccagcccaaacgttcgccacgttccagcacgccggggatttatttcgatccggaagcctatgtgaaaagcgtgccacgcctgtttgaccacctgcgcaacaagctaggtttcggcatcgagtttatccatgacgttcacgagcgcgtgacgccaatcgcttccattcaactggcaaaaaccttagagcaataccagctgttctatcttgaagatccggtggcacccgaaaatatcgactggcttaaaatcatgcgccagcaaacctctacgccgatctcaatgggggaattgtttaccaatatcaatgattggaggccgctgatcaccaataatctgattgattatatccgctgccacgtcagcaccattggcggtattacgccagcgaaaaaactggcgactctcagtgagatccatggtgtacgtaccgcctggcatggccctggagatatctctccagtgggcgtttgcgccaacctgcaccttgatatgagcataaccaacttcggcatccaggaatatacgccggtgaatgacgcgttgcgtgaagtgttcccaggctgcccggaaatcgagcagggttatgcctatctgagcgatcgcccagggctggggattgatattgatgagaagaaagcggcgcagtatccctgcgttggcggtattccttcctggaccatggcgcgcacgccagacggcacggcttcccggccataagctcaggggccgacctggaaacgacatttgtcatccgtgaaaggtgatgcccctcctcaatttgggggagggggtgaaacgtcactcggcatctggtgttgactgtttcagcttttcaattgccgtcacgttttctgacatggcttcattcagcactgcaacggcggtggtcgagtcacggtttttgatcgccataaagactttgatgtgtgcttccacgctttccagcgagatgcccaaggcgcgattcagctcttccagatagtaataataggtatctttgatggagttcatcacgctgtagaacaccttgttttgtgatgctttggcgatcgccagatgaaagtcaaagtcggcctgggaatatttcttatagtcatccttgttgaccagcatgcggtttagcgcttgttccagcgcggtaatgtcttctggcgtggcgtttagcaccgccagttccatgcatttgaattcaaccgtctggcgaaacaccatcatgtcgtgaaactcttcgcggctgaggtgcatgatgggttgctgttcattgagcaggctttgctggttgaggtttttgctgacaaaactgcctttgccttgctgagtgaccacaatccccaaatcacgcaggcgttgtactgcactgcggatactgacgcggctaacgttgaaggagactgtcagctcagcttcagaggggagtttactccccggaggccaactgccatcaagcagtttttctttgatctgctcgtaaaccgcattgaccacattgtgtttttggatcgattgaatgctcataagctccgtcatcaggttgtcctacaacatgcctgtggtatagcacgctcggccttgggtgtgaagcggtggcgactgaatttgtgtcttggctctgacgtaacggcagaaaattaattttgtgatcgagatttaaaattgctgtattggctattgatcaaggtggacatgtgtcgcatttttatacatgaatgatgtcatacaggttaatgtatgacaggttcttaatcacatggattagcaacgaacgcggccaatggatgaacaggctgctgaacattaatcaccgttgggaaaagaattatgagcttgagtttgccaaaaaaattggctccgattcgctggcgaaaactgatcccgctggcatttatcacctacagtctggcctatctggatcgcgccaactatggttttggtgccgcttccgggttggcgcaggatctgaatatcacgccaggtatgtcttcgctattaggggcgctattcttcctgggctatttctttttccaggtgcctggcggcatctatgcggaaaagcgcagtgcgaaaaagttgatcttctggagcctgatactgtgggggattttggcgaccgcgaccggtatggtgcacagcgtagccgcattggcggttatccgctttttgttaggggttgcagaaagtgtggtgatgcctgcgatgctggtattccttagtcactggtttaccaagcaggaacgctcgaaggccaacaccttcttgttcctggggaacccaatcaccgtgctgtggatgtcgattctctccggctatttggtggatgccttcggctggcgtggcatgtttattatcgaaggtgtgcctgccattatctgggcggcgatctggtggatgatctttgtggatcgtccagccgacgctaaatggctcagtgaacaggagaagatcgatctggaagcggcattattggctgagcaggccgagatgaaaccgatcaagaactatggtgaagcgttccgttctcgtaaagtgttgtcactgtcatttatccacttcttctggaatattggcatgtacggtttcatcatgtggttgccgtcgatcctgaaaaccgcatccggtatgggcattgtcgccaccggttggttgtctgccgcaccgtacctgttggcggtaccgctgatgctcacggcctcttacttttctgataaataccaacagcgtaaattgattgtgctgttattcctcgggctgggggcggtgtgtttctgcgcttcatttacgttgggatccaaccacttctggctgtcctatattcttctggttatcgccggtggggcgatgtatacgccttatgggccattctttgccgctatcccagagttgttgccacgtaacgtgatggcaggagccatggcgttcattgtcagctttggggcgttgggttccttcgttggggcatggatagtcgggtatctgaatgggattttccatggaccgcaggcgtcatacgtctttatgggaacctcgctggtgattgcagtagtgttgacggcgttcacccgctttagcaataaaccttcggcgactggcgtatcaagagcggtagcaatatcttgattcatgcagggccggttatccacccggccctgcatggagtggctgccagcgacttgcccttgtgcgttttccatcattagttagcgaaattagttcgttcaactccgtgccgttttggtttgttatctaccccataacaaaccgacataaagaaggcacggcacccatgtttaattttcctttcaagacgttaaccagcggactggcagtggtcttaggcgctgcggctgcggcgagcccggccatcgcggcggtgcagggcggcactctgatctatctggagcagcaggcccataccaatctgtatcccccttccggcgggttttatcccaacggcggtatccttaaccagatcaccgataagctgacttaccagaaccccaagacgctggagatcgaaccctggatcgccgagtcctggtccagcaaccccgataaaacggaatataccttcaaactccgccccggcgtgacgttttccgacgggacgccgctggatgccaacgcggtagcgaagaactttgatacctacggtttgggcaataaatcgctgcgcttgccggtttccgaggtgatcaataactatgaccacagtgaggtcagcgatccgctgacggtcaaattctatttcaaacgctcatccccaggcttcctgcaaggtacggcgaccatcggttccgggctggtgtcgctcagcacgctgaaccgccaatacgatgaactgggtgatgcgcgccatattatcggctctggcccgtttgtggtgagcggtgaaaccctggggcgcgaggtcgatctcagcgtacgtaaagactatcgctggggaccagccaagctggctcagcaagggcgggccaatctggatgccatcaaggtgatcgtcactccggaagacagcgtgcgaattggtgcgttgcaggccggacaggcggactttattcgccagatccaggcttacgatgagaagcaaacccaggatcagggctttacgatctatgccgcgccaacccgtggcgtcaacgacagcattgccttcagaccagacaatccgctggtggccgacattcgcgtgcggcaagcgctgctgcatgccaccgacagcaaacagatcgtcgatacgctgttctctgccaactacccacaagccaaatcggtgattgcctcctcggcagccggttttgtcgatctctccgataaattgaccttcgatctggcgaaggccaaccgcctgctggatgacgccggttggcaaaagggcagcgacggcctgcgccagaaggatggtaagaagctgttgttaacggtgtacgagtcgctgccacagccgcaaaacaaggcggtgctacaactggtctcgcagcagtggggcaaggtgggggcgcggttgaatatcttggcaggcgatgcaggtagccgggtggcggataacctcgatccgcaaaagaccccggcttcggtggtagaagtgggccgtgccgatcccgatgtgattaaaagccagttttatcccaccaatcgtgatggcctgttgcagcaggggggcaccagccagaacagtaaatttatcgacaactcactgaaccaactgctgctggggatcgcctctgaagtggacccggccaagcgcttacagattgccggtgaggcgcaaaagtatctgctggatcaggcctatgtgatcccgttctttgaagagccgcaggtctttgccggtgctccctatctgaaaggtgtcaactttgaagccgtgggtcggccaagcttctatggcgcatggttagagaaacggtaacgccatattcgaggagataaagatgctgaaatacctgagtggccgaaccgggcaggcgttgttggtgctgtgggcggcatttacgctgtcgtttatcttgctgcaggtgctgccaggcgacgcgatcctgattaaatttcagaacccggatatgggccttagtccggcgcagattgccgacatgcgcgccgcctacggtgccgatatccccctgtggcagcaatatctgcataagctggggaatttcctgcgcggtgatttgggctattcgatccagaacggcgtgccggtgagtgccttgctggctgccaacctgcctgccaccctgcaactggcggtgctgggtttcaccctggccttgctgttggcactggtcattgcctttgtctccaatctgatcggttttggctggctgaaatcgacgctgcaatcgctgcctgcgctgtttgtgtcggttcccaccttctggcttggcatcgtgttgatccagatcttctcattccggctgaagctggtgccgatcattaatccaggcgagtgggttggcctactgttgccgatcgccaccttggcaatcccaatatctgcaccgctggcgcagatcctgatccgcagcattgatagcgtgcaaactcagccgtttgtggcggtggcgcgtgccaaaggggctagccgtagcggagtgctgtggcgacatgtggcgcgtaacgccatgctgccggtgctgactatcgcgggcattttgtttggcgaactgatcgccggagcgctgatcaccgaaaccgtatttggccgcagtggcctgggacaactgacacagcaggcggtcgtgaaccaggatgtggcggtgctacaggcggtggtgatgatctctgccgccgcctttgtcttcctcaatctgctggtcgatctgctgttcccgttgctcgatcccagactgaaaacctatgcaggagcgacccgatgagcagtattccgttggaaaaatccgtgatgccggaacgcgatctgtccggtggggaagccgaagggagtgtacgcacagccaggcctgctcagcggcgttatccgcttagcctgtggctagcctggatcgtgcttgggatcgctgtgctatgggcgatcgccccagaactctttactgcgtacagcggcacggaagggattgccggagcacaacgtctggcacccggtggtgaacactggctaggcaccgatccgctggggcgcgatctctacgcccggatcgtctatggcgcatcgcacactttatccgcagcgctagttgccgtggcgctggggctggttgtggggacgtcgctgggtgtggtcgccggggctttaggcggcatcgtcgatgatgttgtgatgcgcttggttgatgttttgctgtcgatccctgggctgctgctttctttgagcgtaattatcctgctgggcttcggcacggtgaatgcggcgctggcggtggggatctcgtcggtggccaactttgcgcgtctggcacgtgcggaggtgctgagggtgcggcacagcgactacgttgaagcggcctacggcagcggcggacacttttgggcagtgctatggcggcatattctgcctaattcgctgacctcggtgattgcattctctgccctacagtttggcaatgccattctggcgattgccaccctgagttttctgggatacggcacgccaccgcccacgccggaatggggcttgctgatcgccgaagggcgtaactacatctcaacggcctggtggctgactaccttccccggcctgatggtggttgccgtggtgctggccgccaaccgaatcagccatgcattagggagcgcgcgccgatgaacccacagacaaccgtttcacctgtgcccttgctggagctggataacgtttctatcgcctatcagcagggcaacagcagccagcgggtagtgcacaacgtttcttttaccattcagccgggggaagtcgttgccctggttggggagtctggatcggggaaaaccaccacggcccaggcgattatcggcctgctggcggaaaatggccgcctggagcagggggctatccggcttaatggcaccgatattgcggactggtcaccgcgccagttggatgcggtgcgtggtgcgcagataagcctgatcccgcaagatcccgccagttcgctgaacccggttaaaaccatcggtgagcaggttgccgagatcattaatattcaccgacgcctgccacgcaagcgggtacagcttcgggtagtggagttactcactcgcgtggggttgactcaccctgaattgcgggcgcgccagtatccgcatgagctttccggcggcatgaagcagcgggtgctgattgctatcgccatggcgttacggcccgcgttgatcattgccgatgaaccgaccagcgcgctagacgtaacggtgcaaaaacgcattctcgatctgatcgacgaactgcgtcaggagtttggcacggcggtgctgttcgtcacccatgatttgggcgtggcggcggaacgggccgatcggctgctggtatttcgtcatggcagggtacaagaacaggggcaaacggcggcgggattgcagggaccggcgcatgaatatacccgccgcttgtttgccgatgtgccttcgctggcctccgtcgctccgccagcgatcgcccgtaaggtagaaccggctatcgtcgtcaacgaactggtgaaggatttccgttttgctggcagaggcgggcagccgttccgcgctttggatcgggtgtcgttcagcgtgcagcgcggcaccacacatgcgcttgtcggcgagtctggctccggtaaaaccaccttggcccgctgcctgttgggttttcagcggccggatgctgggcagatcgttatcgacggcgtcgattttacccggctaaagggcgaggcgctgcgccagtttcggcggcgtatccaactggtctatcaaaacccctttgcttcgctcgatccggcgcaaaccttgtatcaggcgatcgaagagccgttgctcaactttgagcctgtcgccaaggctgagcgttaccggcgggtgcgggaactgttcgagcgagttgctctgcctgccgagcttttgacgcgcaaaccgcgtgagctttccggtggccaacgccaacgggtcgccatcgcccgtgctctgatactgcagcctcgggtgttggtattggatgaggccacttcggcactagacgtgaccgtgcaggcgcaaatcctgcgcttattgcagcagctacagcaggagctggggctgacctacctgtttatctcgcacgatctggcgacggtgcggcaaatctcgcacagcgtctcggtgctgtgccgtggggagcaggtagatgtgggcactaccgccgagatatttgcccggccgggcagtgactatacccgccaattgattgcggccattcctggccgtgggatgtatcaaactttgaaggatgcctcatgagcgctaaacgtctcggcttttttacccgcctgctggataacggcagtgctcaggaacgttaccggctggccaccgagcagattgtccatgccgaacgcgccgggttcgacaccgcctgggttgcgcagcaccattttcatcaggatgagggcgggctgccttcacccctggtttttttggctcaggctgcggcgcacacccggcatattcgtttggggactggagtgatcaccttgccgatggagtctgccgttcgcgtggcggaagatacggcagtgttggatctgctatctggtggccggttggaagtggggctggcggcaggaggaaccccgtcttcgtttagcgcttttggtattgatgccgagcggcgtaatgcggcgtttaacgataatttacgcattctgctggatgcctggggcggcgaagcgctcggcaacgccaccaaccgtctctatccggccgctccccaattgaaaaaacgcgtttggcaagccaccttctcggttgaaggtgggatccgggctggtaaggctggggatgggctgatgttgtcacgtactcaaccccggccgccagccacaccggatacgccactcgatgagctgcaaaatccgattattgatgcctatctcgccgcgctgccgcctggggtggagccccgcatcatgggatcgcgcaccgcttttgtgaccgaagatcagaaccgtgcacgggattttgctgcacaggggcttagccgtggattggagcgtttacgcgccagtgggcatcaggtgcaggatgagtcgctcgacggtctgatccgcgcttttgacgtgcatctcggtacgccagaacaggtgatcgcctcgttgcaacgcgatagcgcgctggcccgcgtcaccgatttggcatttcaggtgcactctatcgatccgccacacgcctatattttgcgctccattgagctgattgctcgcgacgttgcaccagcattggggtggcagcggtgcaaccctgccacgttggcttattcacatcacgcagaggaaaacgtatgaccgatacccaggatcacctgaccagactggctgaaatcgccccagactctcctttggcacaggccagagcaacacgtcaggcggccaccgacgggattgaggccagctatcagcggctgtttgcgccacaggatgtgggcgatttcgggattgcggagcgcctgctgttggcacaacgtatcagtgaatggcacggcgatcggcagttggcggcgcattatgcccaactgcagcaagctcagcccgcagacggcccacgtttgcaggctgcattggatcatgcagaacgcctggccttcaagcctgccggggccgaagccaaacacttacaggctctgcaacaggcggggtggtcgttggatgacattgtcacgctttcacaactgatcgcctttgtcagtttccagagccgtctgttgttcggctaccgcttgctggcaggattaccggtagcgaccagcggtcgtgctcctgtccgagcctcgtcctggcgcaccgcgagtcatacagccagtggtcgcaatgcaccgccagcgttcaccagacaggagttgggatgggaaccttggattgcggctaaatccttggaggcgtttgacgagccgggaaaagccttgctgagcaagttcggccacgcggattccgactatttccgtttgctggctcgcgatcatgcggtgttggaacagagaactatcacggatcgggctattttctacaccgctggcggtttggcccgccaggatcgggagttggctgcggcggtggccagcaaggtgaacggctgtatttactgtgcctcggtgcatgcgcgtaaagcggcgcagttatccaaaagggcagaagaggtgcagcgcctgctggatatcgcaccgggagggaacttgagcgaagggcagggtgaggattggcgtacccaaatagactttgccgccgcgctttcggctacgccaccgcaggccaatgcggctcagttggctgcgttacgcgaacaagggttgggcgaactggaactgttggacctggtgcaggcgacggccttctttgcctgggccaaccgcttgatgctcacgctcggcgaaccttatgacgattgagtcacacggtgtttaaacagcaaaaagcccgcttagttgcctaagcgggcttttctaaatatggctcctctgactggactcgaaccagtgacatacggattaacagcccgccgttctaccgactgaactacagaggaatcgtgtgaacggggcgaataatagcggtgccgatggggcttgtaaagcatgaaaatgcacaaaagttccgtttgtcgaggttatgagcaaatcggcttattttccagcaggttaaactttatcactggcaggcagtccactatcaatgtaggccgaacacattttgtgagttaatcccgaatttttgcgaggtgtggatattttaaagagcaaggccgagaaaattcctaataataaagcgaggaaatgagattttttgctaagatatttcctgtaatttgtggggattgttcctaataatcgatgggagagccagcttaaggattatcatcaaatcccgtatttttaacacaacaatcagaatgcctcggataaatctttagttcgtgctgtcgttatagaaaatcatccgggtacgtgtggagtaaatcgccaaaaaatgcatttttaataatataaacatctatttttaatcatggttaatagtcatctttattcggaaaaatgacgggcagaagcatagcggcggatatcgtcattaattaatctatctaattgtttttaatgtatattatttttattttttgcggttttctttaccggggaatcagagtggatgctgttgcataccggagcgtatccttatccttcctggcgactaacgccgtttttgccccgcaactcggcgttcaggctcgcttgtagagttgctggatatacaaaataccagtattattttgcacttcataaacgtcgtgggtaggttaaatcgctggcaagttgcggcgcattattgcgctatgcaggtcatcgaggaaacccggctcagtattcgttaagtcaatagaccatggcgaacgttgcaagagtagggcaatgagcggccatagtatagctccagtgaatgtttgctactgaagagcctcccctatatcattgctgaaaagtgcacctattatttatccaggatataaccgatcttgtctgagttgacctatcggtaacggaattttttgaaaggaattttcgatgataagcacccaaaagaacctctgtttaggcgtaatactgtgcagtggtttattgctggcaggatgccagaaaaccgcacagacccgttcgcaagaagactcgccagcgaccaccgtacaagctccccctcagcagatcagcgtgtccccgccaccacaaccggttgccgcagaaaccaaaaccagcaagattggcctttgccaaagcgagttggcctcactcaagcaggttaatccgaaggcttacgcggtcaaacaggccaactttaaccgtctggtgaacaatgcctcggtttatagcgcggtgcgcggcgatgtcaattcgacaaccaaagacactcttgatgcgttgtacaaatacaagaccaatcagttatgtgccgagatcgaacgtgatgtcctgcaaggcctgatccagagaggggaaagcgtgaaatgaaacgcaggatatattgcggtgccttgttgacgttggcgttgccgctaggagtcgtaagggctgaggaggcggttaatcccgatgcccatgcgttgaattcactggacgcgatcacacgccaggtggatgaggctccggcactcctgtttctgacgccttcccaactggatacagcagaacctgcaagacccaaaagtagtaagcctgccggcagcaaacctaacgcactggcaaagtcggcggatgagaggggcagtgagcgtattcgcgagatgaagacgctgcaggcaaccatcaatcagctgaaagccaaagtcaccagccaggaagcggctcttgaacagttgcgtaaagcgcaatctcagtcagcgggttcttcagcagagttggcgcgtctgcaacaggccattgagcaaagtcaacgtgaaaatgcgcggctgcagcagcagcttgccgcacaggccaaggaaagcgagcgtcagatgcagcaaatgaagctgcaacagcaggagcaacgtaacagttcgcaattgcagcaacaattggcagcgcaaaccaaagataacgaacaaaaagcgcaacagatcaagcaactgcagcaaacgttacagcaaaatcaacaggccattgcccaactgcagaaccagttgtcagcccgtagcaaagagaatgaacagaagtcccagcaggcgatggcgaagctgcaggagcaactggctgcccagaccaaagacagccagcagaaagctgagcaggtgaaacaactgcaacagactggtgccaagttgcaagagcaactgacggcgtatgctaaaactgacgatgaaaaagccgagcaggccaagcaactgcagcaaaatcagcaggcgttggcgaagttgcaagagcagttagccacccagaccaaagacagtgaatacaaagcccaactggtcaaacagctgcaagatcaactgacgacgcgcaacaaagaatcggcgcaaaaaaaccagcaggcgatggcgaagctgcaagaacagctggctgcccagaccaaagacagcgagcagaaagccgaacaaattaagcagttgcagcaggccagcgccaagctgcaagagcaacagatcgcggctcaaaccaaaactaccgatgaaaaagcccagttggctgnnnnnnnnnnnnnnnnnnnnnnnnnnnnnnnnnnnnnnnnnnnnnnnnnnnnnnnnnnnnnnnnnnnagagcgtgagcaaaaggccctgcaggt

SEQ ID NO: 200 - DNA, 203 bp, unknown
  Altogen  635822 strain
ggcagtgaccacgatatcccgtttccgtcccgcacaacgccgtttgtaatttgcctgcctacctggccaacaatgagcacgtcggctgttgaccggctggcggggttaaccgatatcccgttaatcttgacgttcgacgccagggcgccatgttgagcggttgccgggctaaatgagttgtagacggcgatcgatgtgttgtt

SEQ ID NO: 201 - DNA, 412 bp, unknown
  Altogen  635822 strain
tgctatctcgttggcctcgcggtcaccgatgacccggccagcctggggacggaataccttgaattctgctcaaccgctaaaaccaacccgctcgcgggtcgtaaggccgagccgggcgacctgttctcagtggccaccctggtcgaactggagttcgaagaggtgcccgataccctcctgtccagcctgagcgaaaaggtaaaggccatgtttagccgcaagcaggagagcgatgacgcgcgttttagcgatgtgcatgaggccgtcacggcggtgggggagcagggacaggccagcggcgaaagcaccgcgcagcgttttaccgagctggagcaggaaattgctgggttgaaaaccaccgttgaggcgggcaagcaggcgtttgccgagctgaaaaccacgctcgacaaca

SEQ ID NO: 202 - DNA, 1653 bp, unknown
  Altogen  635822 strain
  misc_feature (1077)..(1121): n is a, c, g, or t
gactcaagtcaatcgttctgcgtatggcacgatgacgagggtcagtattggctagacgtccattatcatcgggagtggcgtcgggcattcttggaaccgttcgccacctttgaagaagggttcgaagccgtaagagactacggcttcggggagccaccgaagaagtgaatgatgggtcaagtggtgctgtaatagcttgccatgttgccgatgatcccctgattaactgcccccttatcactttgatagatgacgatttcagcgattttactattggcgttcccggcctccgtaacgggatttatccccctgcgagtagctccaatcgtcgcctgctctaaatgcatagctactgctgacatatcgactgctgagccaacagaacggccatctacagcatatgccgtacctcctgatctaattagaccaccagttcgacctatggtattcagactggtcggcgaaacaacggattttgaaaccgcagatcctctaacaacacgctgtaacatcccaactgaccccgtcacacctgagtattgcccattcgcctggaacagcaacagatcattatctcccgccactgcagaatctctcgccgccattgagagtacggtaaatgatgctatagttttcgcttccgcaacgaagaacatcgatatatttgcgtttgccgctgtaaactgctggggcagaacttggggaacggaaagataatcatcgacgccgtcgaatatgattgaaggcttaccatttagaagaaccggggtgccaccggatatcactttgggctggaatccagcagttggttgcgtcgcatgtaagccgttaccggtctggtcatagagagtaaccactgtaccatctccactacccacaaaaagcttaacatcatcgatactgacggcattattaacagcatagaaatcctttgttaagttgtcagaagaacgacgtattgttaccaacggcccggcgtaaatgccgcttcctacctggcgcaggctgtaagccgcagaagcaccagggtacataccaagcaggcggtcggctccgataaagttagtgaatacagtnnnnnnnnnnnnnnnnnnnnnnnnnnnnnnnnnnnnnnnnnnnnncataagggaaagctgagctttgagtataaataaccccacccgcctttgcttgtcgaatgaaattgaatctggcgtttatcaacgggcaactgatggttaatggagtttgtgagaaattcgatgtaattccgttcacaacaatatttcgaatatctgtcaagtaagcaggtcttccatatgtcgaagacgttgatactaaaacttgactcccacccacgccgagagtgtcttccacgttagaaatactcacggtgtcaatgacagagcctccagtaggaagtattctaacctggttgtgtgctgagaaactcttaacaccagaaatggaaatgttagttatattgtcgccaagtggattagacatatcaccaccaacttgcattgggtagatatatgggccgaacgggtatgaatcagtgaaattcaatatcgcagtcattgcaatagtgtcatctgatgtaccgccggttatccgttcaacctttccatttgaacatccttttctaaaatcaataccatccccgttttttac

SEQ ID NO: 203 - DNA, 72859 bp, unknown
  Altogen  635822 strain
  misc_feature (53176)..(53303): n is a, c, g, or t
  misc_feature (53339)..(53442): n is a, c, g, or t
  misc_feature (53479)..(53590): n is a, c, g, or t
cgggcagattactggagtaaaactggggcacaatcggtcccctctccctgtgggagagggttagggtgagggggcgttttactcagtcggcaacgctgtctgatacaggttttcccacatgcccagcaccagtatctgatccggcggggaaagctccccggccttgatggccttgtccaggctgctctgcacccgcaccttgagctgctcggcgctgtgttcggcatgttcttccgattccgccaccgccaaagtcagatgaccgcgcaggtagccaccggcaaacagttcatcatcgctggcgtgctctaccatgtcatcaatcagcgccagaatgcgcgcttcaaattctgcgatcatcaaatttcctcgttaacaaacagactctggcctcagagatcttccgggtagggaaaatgctcggccgccagcggaggcgtattgtaaaacgattgcagcgcctgaataaagcgcgcaggtcgtgtgggtattccccgttccagcaattccagcactcgggtacggactttacgctgaaaaccgatgcgatccggctcgcaatctccactgagattgtcgcaactgacgttgaacgggaaaccggccgccacgcagaacatccactccagcgcctgcggattaatctcaaccgcctcgaattcactctgcgtctgggcatcgcgcccatccgggcaataccagtaaccgaagtccaccagcttgcggcgttctgctccggcgatgcaccaatgggagatttcatgcatgccgctggcatagtagccgtgtgcaaagacgatgcgattataaggcagctcatcatcggcaggcagatagataggctcatcgtcgcctttgaccaggcgggtattgaactcatcgctaaaacactgattaaagatttcaatcagttgcggatactggtgtgtgtttggcataaaaaactcaaataaccacaaaattaaggaggccattatagccgatatctctcggcttgccgcccctttgaaatgttaaaaatgcaacgccaaccactgctggatttccgccccgtgattgtcgtacagcaatttgcagctcatgatcagagacactatcacgatcatcggccggatcagcttctggcccttggtcagcaccatgtgcgcaccaagacgggctccgaacacctgccctaccagcatcaccagaccaatactccagatcacttggccgccgataataaacagcaccaggctgcccagattggaggtgaagttcaacaccttggcatgggcggtcgccttggccaggttaaaaccgcacagcgtcacataggccaaggcatagaacgaaccggctcctggcccgaagaaaccgtcgtagaaccctacgcagcccccagctaccaggccaaagggtaacgcccccagccgacgctggcgatcgttttcccccagccgtggcgtcagcaagaaatagacgccgataccaatcaccaacagcggcagcatctgccgcaatatatcggcacgcatgtgctgcaccaggagcgcgccgatcactgatcccaccagcgtcaggaagatggtcagcttctgggtattaagatcgacagcgcgacggcgaacaaagtacaggctggcggaaaacgatcccccaaccgactgcaatttattggtcgccagcgcctgggttggcgggacgccaacggccagcagagccggtacggtcaacagcccaccaccaccggcgatcgaatcaataaacccggcgaacattgctaccaaaaacagaatcccgagcaattcgggacctaataccagcccatccataagtcgtctgcctgcaaaagtggagccactttgtttgccgcacacactacgccttaaaacccaaaaaataaacgccccattcgaggcgttttcatcaggctatcagcgattggcgaagtggctatccagcagcgcctgacaggttggcggcagcggtggtggctctttcttgaccggattggcattcggctgatgcggtttgaaccaactggccaactcggcaccacagccatcacccaccggcggcgcatcctgatccagacactccaggctacccgccgggcaacgcaagcgtacgtgcatatgcgcacgatgcccaaaccaaggccggaccttatgcaaccaaccgcgatcggcaccggcatcctggcaaagacgctgtttgatcgccgggttaacgaagatccgcgtcacttcgctgtcctgcgccgccatcttgatcaaagattcgatttgcggctgccactggcgatccactacttgcttaccgtcgccagagaccagatcgatcggctgcggtttcaacagttgctgagcgctccaacgttggcgcggcagctgcaaccagatgtccacgtccaaaccggattggtggctggcatggccgctgctgaagcgcccaccggctggcattgccatatcgccgatcaacaccgtgcccagtgctttctggttggcctggctgctcaggcgttgaataaacgccagcaggtcaggatggccgaagtagcgccgctggtcggtacgcatcacctgataatccggtgagttaagcggcaacggatgcgccccgataatacaaccattggcgaaaccgccaacggcctgtgcagttccactgaccgggtggtcaatcttttgccacggcgttaacgccaaggcagagctggaagcgatcaacgcagcgaagcccagcagccattttttcatcgtagtcccttaccagcgtggtacgtcggaaatcacatcaccgttttgcgcacgctggcgcagcagatgatccatcagcacgatcgccatcatcgcttcggcgatcggcacagcacggatcccgacgcacggatcgtggcggccacgggtgaccatttccaccgcttcaccctgacggttgatcgtacggcccggcaccatgatgctggaggtcggcttcagcgccaaatgggcaatcaccggctggccgctgctgataccaccaagaatgccgccagcgtggttgctctggaaaccttcaggggtgatttcatcgcggttttcactgccacgcttggtgaccacggcaaaaccgtcgccaatttccacgcctttgaccgcattgatgctcatcagcgcatgcgccaagtcggcatccagacgatcgaataccggctcgcccaaccctaccgggacgttttccgccaccacggtcactttggcaccgatggagtcaccctcttttttcagcgcgcgcatcagttcgtccagagcttcaagcttgtccggatccgggcagaagaacgggttctgctcaacctgatcccaatctttcagctcgcagctcacgtcgccaatctgcgccagatagccacgcacctgtacgccaaacttctgcgccagatattttttggcaatggcaccggcggcaacgcgcatcgcggtttcacgcgccgaagaacggccaccgccgcgataatcacgcacgccgtatttctgttcgtaggtgtaatcggcatggccagggcggaacacatctttgatcgcgccgtagtcttgcgagcgctgatcggtgttttcgatcatcaggccaatgctggtgccagtagtgacgccttcaaaaaccccggagaggatacgcacctgatccggctcgcggcgctgggtggtatagcgcgaagtgccggggcggcgacgatcgagatcgtgctgcaaatcagcttctgtcagcggaatacctggcggcacaccgtctacgatacatcccagcgccacaccgtgagattcaccaaatgtggtgacgcggaaaaactgcccaatactgttccctgccatcacggctccttaccgttggttgtcatcccgttcgcgtgcaaacggggcatacaggcccacactatggcgagcccaggttgttggttagctgcggtagaggctgaaatgatctttacaggcaatcagctgctgtttcgtcagcatgaatacaccgtccccgccgttatcaaactccagccaggtgaacggaatatccggatattgttccatcagatgtaccatgctgttgcccacttcacaaatcagcacgccgtcgtcgctcaggaagtctggcgcacaggccagaatgcggcgcaccagcttcaggccgtcgctgcctgctgccagccccagttccggctcaaagcggaactcttgcggcaggtcgggcatgtcttccgcatcgacatacggcgggttggtgacgatcagatcgtattggatcgcggggacgtcacggaacagatcggagcggatcgggatcacctgatgttccacgccgtgcgcctgaatattacgctcggtcacggccagcacgtcggtggagatatctaccgcgtccacttccgcttccgggaaggcatagccacacgcgatagcaatacagccactaccggtacacatatccaggatatggcgtggcggatgggggatcagcgcgctgaaacgatcgttgatcagctcaccaatcggtgaacgcggtaccagcacgcgctcatcgacatagaactccagatcgcagaaccaggctttattggtcaggtaagcaaccgggatgcgctcgttgacacggcggatcactcgctcaacgatgcggtgacgctcgctggaggtcaaacgcgcagtgcgcatatcttcaggaatatccaacggcaggaacaggctgggcaagaccaattgcacggcttcgtcccacgggttatcggttccgtggccatagtagatattggcggcgttgaagcggcttacggcccagcgcagcatatcctgaatggtgtgcagctcattcactgcttcttcgacgaaaattttgtccaatttgccctccggcaggcgcgatgattcatgatttagccccgtagtttgccatgaagcctgcgacaaatcagcagcaatagcagcgtagcagcattctggttggcattcagtgccagttttgcgtcgacagaaaccttcgagcaggtaaactagcgcgataaatgataggcgacgagcgaataatgaagaataagccccctctgagcaaagatgaattattgctctttagagagtcggtagctggagcaaagaagctgccgcaggacaccatcgtccacccaaaacctaaaatgaaaaccaagcagatcgcgccgcagcgcctgttgcaagagcaggtggatgccagcttttacttttccgatgagtttcagccgcagttggaagatgaaggcccaacgcgctatgtgcgccccggctacagccactatgagttgaagaaactgcgtcgtggggactacgtgccggatctgttcctggatttgcatggcttgacacagatgcaggccaagcaggaactcggggcgatgatcgccgcctgcaagcgtgagcacgtgcactgtgcctgcgtgatgcacggccacggcaaacacatcctcaagcagcaaacgccgctttggttggcgcaacatccggacgtgctggcgttccaccaggcccccaaagaatgggggggtaacgcagcaatactgctgttgatcgaactagcagaatagcgatataaaatggcacttagcggtgccaaataatccgcagtgacggttccaagaagggggccatgagttgagaacgacctcgacgaaatagcccctccccatcctggcaaaacctaagatctctccccaataccatacccacttaaataccccaaatatttttaatcttgaatttcaaataaaacatttgttttaaatatacttaaaacaaaaatcattgatgtgatttaaaattcacgagaaagatcctgtattaacgccaaaaagtagacagggaaaatattacaagtagaatgcgcattttgttaaacgcagataaagcgtaaacattgtcgtccgcagttaatagacacaacgaatagccgcatgacaaatatagcaccttgagttaatcaaataatagccaatacctcctgcccaacgtgggggatgatccctcatggttgacagaaatgaagttggctgcaaagcctttttccaccagttcggctatcaatattgatagtctttgcatctaaaatattaaaggaaataatattatgaccctaaaaaacaaacagaagccgttttttgccaaactttcgccaatttgtttctttagcctgctggccttacagggagtaaccgttgcccacgccgctatcgtttccgccccaggtggcccatcgctcggtgccagctccatcaagggcggtacggttatcgacattaataagcccggcagagggggcgtatctcacaatatctataaccagtttgacgtagaccgtggtggagtggtgctaaataacagcgcacaaaattcaacgacccaggtggcgggtgccattaacggcaacaagaatttagccaacggtgccgccaacgttatcctcaatgaagtcaactccgctaaagccagccaactcaacggtatgattgaggtagcaggtcagaatgcacaggttattattgccaacccatcggggattacctgcaacggctgcggttttatcaacgccaatcgtgcgaccttgaccacgggcaaggcctcggtggctaatggccgcgtcctcgattacgttgtcaacaaaggtaaaattaccattactggcgatggcttgcagagttccagcgccaactataccgatctaatcgcccacaccgttgccattaacgccgacgtgcaggcccaggatctacgggtcacttatggccaaaaccgcgttaatgtcgacaacaccaaagccaccctgctctctgctgctcgtcagtctggcataggccttgacgtgtccaacctgggcggcatgtacgccaacaaaattacgctgatcggtaccggcaatggcgtgggagtgaacaacgctggcaccctcgccgcttccgttggcgatgtgaccatgaacatgaatggttcactcaccaataaggggactatttctgcccaaaaagatatcagcgtggtattaacccctagtaacaacactacatacgtaataaacagcccaggtggttatcttgaagctggcaatgatattgatattaaaagctcttacgtaagaaacatcaaggggaccatggtggccgatggcaatatcaacatcgacagttccgcagccttatcttcaaatgtaggggtcgataatgataatggtgaactcagcgctggaaaaggtatcacgattagcaccaaaggagcctcaatcaagaacagcagcggtatcatcagtgccgtggacgatgtcaccctggacgccaagtatggtgtgaataactacgtgggtagaattgtatcagattttggtggcgtgacgattaataccgctaacaccctcttcaacgacagagggattattgaggccaactgctgcgtggctctgaatgcttacaagatgagcaatcaatacggcctcatccaaaccaaggatgacgtagttattaacgtatcctccgagctgaataacacccagggtgaaattctggcagaaggcaacatcgctataaaagcatcagagattaaaaacaactcaggtaaaatcatggctcaggaagccttgaatatcgatgccgcccggttggttaatagtgcttatcacaatccaacccaagaatacggtatattcagcggtggtgacatgagcctaaacttgagctcctcactcaataatgagtatggtgtcatcgcttctcatggtgatatcaccgtcagtcctaactctctcatcgccaataaacatgggcatattgggagtgataaaaacatcatgctgagtgcgaccagcattggcaatcacaatggcaatatgattgccggtgataatctggtggttaatgcatcacgtttagataatggttcatcagctagcactgcaggaaacattgaggccggtgatactttagagatcaacatgaagcgcggagcccttgccggtggtcagcgtgtcgatggcagcttctataatcaagggaccttggttggcaaaaacaagataaagatcgatacagacgggaaattcggcaattacggcaaaatgatttcggacaacactgtagaaatccataccaagtactaatccagagccaatactgaggcgataaatacccctatcacgtctattagcatcgcgagataggtaataacaagctgatagccatgttatcaatggctatcagctgtttttcactcctgcctatcttcacactgcacccgattaaagaaaaatcatattaataaggaagttaacatgcgttttcgctttctcaatgcctggttattgcttattttcaccccactggttcaggcaactgaaaaaggccagtttattgagcagcaaatgagccaccagcaggaacaggaaaaagcacgctacaaccaattggaaaccgtaggtaaagacgttcgctccgctggcagcgcaggactaagcacccacatcgactttcccgaagaacaaccctgtttccccctacaacgggttgaactgaataaggacgacaagatccctcattggatacccttgcacaaactgacagaacaggcacaagggcgctgcctggggatccaaggggtgaaaacgctcgcgaccgccttgcaaaacaagctgattggacatggctatattactaccagggtcatgatccctcagcagaatttgaagcaagggcttctcactctggatatcctgcccggcaccattggcaacgtcaggttgaccgatgacagcgatcagtacgtcaacttgcacaccaccttccctggcagccaaggggatctgctggatctgcgtgcgattgagcaggggttggaaaacatgcaacgcattcctgatgttgttgccaacatttcactccacccaggcagtaaggcgggtgaatccgacctggaaataacgcgtgaacaaccctcattctggcgtttgggcggttggctggatgactcaggcagtaaacaaaccggccgctatcaaagcggcttggctttatatattgataacccgacttcgatgaacgatctgttctacgtttctgccggtcgtgatttgcagttccaatcgagccgtcattctaataatggctcgttgtactactcggtgccctacggcttctggtcattggacttatatgctggccgcagcgaatatgtacaaaatatccatggcatctataccgatttttcctaccgcggcaagtatcgcaaccttagcttaaaaatcaatcgcctcttgtatcgcaacgcgagccaaaaaaacacgctcagctttcaagtcctcaagcgtaactcgcatttttatctgaacgatacggaactgcagttgcaaaagcgtaatatggccaactggagcattgagttcaatcaccgccactacgtcggccagtctattgtcgatgccatgttgagctatcagcgtgataccgcctggtttggtgccgaaagaccggtggacagcgctccgtcaagccgcatcgtcaacctggatatcagcacctatacgccatttaccgtgcaagatctgtcactgagttatcaatcccgctttcgccagcaatacagtccggaccgcctgaccacccaggatcaattcagtatcggtaaccgctggaccgtacgtggttttgacggtgaaatgaatatgatggccaacaagggctactccctgcgcaatgacctgaacctgaacctgccaaaactggggcagcaattatacctgggtatggattatggccgggtgaaaggagacggtagtaacgactttgccgatggccacctgcttggtagcgttgccggtattcgagggaaggtaaaagcggtcggttatgacgccttcgttggggtgccgctgtccaagcctgataatttcaccaccagcccggtcaacctaggctttacgttacagtggcaattttgaagacgttaatgacaaagggcgatgtttatcatcgccctttgatggtgagaacaagctcagaccttggccatcacctgtgacgggctgccctgccattcaaacttgccgacgctgccatcctctgacagatcgacattagcaatggcggaggtcgcaaacattggcgggcattctccagggcacagctcggccaccagataacccaccagcggtagatgggaaaccactaacaccgcaccgatgccctcttttgccagcgcctgcagataacagctcaccagcccagcgtcgcccccaggagtcagctccggcagcacttcttcaccttccggcagcgttaacgcttcgcgtaccgtttccagcgtctgctcggcccgcaaataggggctgaccagcactcgttcaatatccacagacttggtgttcaaccaggccgccatctgacgtgactcatcacggccacaaacggtaagaggccttaccgaatcgctggctgcatcgagtgccgcctctccgtgacgcataatcaaaacttgcatattgcaccgctgttgttgacaaaataacgctatacagaaacgccgagcgtgctgtatcgccgagttgcactcaagaacacaggcctgcttcaaacgataacgcgccgtctctctatggcggccgggcatttttcctgaaagttcgcgtaaagaaaacgctgttttttacaacatttgcgcccttacacaaattcatcgctgacataacaaccaattcaacaggttaaattttaaccttgttgctatgaaattttggtagcgctgagtgagccacccaccaaaacgctacgttacccctccccaatctccctgtacagcttccgggattgccctaattgcaaggagtgatggcgatcacagtgcggccctgatcaaactgtagcgcaaaccgggccgccatgctggttaactgccttgcggatagaagcgttccccctgctccgccatgcgctgcagacgttcacaaggagcaaaatactcaccgtattgctgttgcaggtagcgcagggtttttaccactttctccgcgcctagctcatccatatagcggaacgggccgccaaggaacggcgggaaaccaatgccaaacaccgcgccgatatcaccatcacgtgcgctgcgcaccacgccttcatccaggcaacgcgccgcctcgttgagcatcatcatcacacagcgttgagcgatcaccgcatgctgaatatgcgccttgccggtgatacccaacaatggatagatgctgctgtcagcgctcttgcgtttctggcgtgacctactgccctcggctgggtacagataaaaaccacggccattcttgcgccctttgcggccgtctttcagcaccgcgtcgaacgccgctggagcggcaaagcgtggccccagctccgccatcaggatcgggataatcttggtgccgacgtcgatacccacttcatccaacagcatgatggggcccaccgggaaaccaaaatcgaccaaagccttatcaaccgattcgataggctcgccttccaacaagcatcgtgccgcctcattaatataaggagcgagaatacggttcacgtaaaaaccagcacgatcggcgaccacgatcgccgttttcccctgtttgtgggccagagcaacggtggtggcaatagtttgttcgctggtagtggcatgcgggatcacttcgaccaacggcattttatccaccgggctgaagtagtgcagaccaataacctgctgcggcttggctgcctgcgccgcgatttggccgatcggcaatgatgaggtgttggaggcgaatacggtatgcggcgcggcatactgttcaatatcggccaccatctgttgcttgagcgcgatatcttcaaataccgcctctaccacgatgtcgatccgttcaaaaccgctgtaatcggtgctgcctgaaatcagcatcatctgtttctgacgctctgccggacgcatgcgtttgctgcgtacccacttgcccaacagatcccaggtgtatttcaacgcatggttgatcccctgctcattcacgtctttaatgcgcaccggtagcccgccacgagtcgccgtgacgcaggctataccgccgcccatcaaaccaccgccaagtacgccgacgcgctgtaattcatggggttgggcatccccgccgcgctcttttttcagcgccgtagaggcaaagaacaggctgcgtaatgcggcagactgggaagacatcgccagttcaccgaaggcgcgggcctccgcttcatagccgctggcactgccatgatccagaccagtgcgcaccacttggataatacgctccgctgcggggtagttaccgtgggttttctccagggtcttcttacgcacgatgctgaacaacaggcttctgcccaacggaccgttaagcaggcgttcctgccatggtaacgcacggcgcgatttccaaccttgttttacacgctcaatggcggtttgcagcagaatggattgcggtacggcctcgtccaccaggcccatacgcagcgcctgacgcgcgcgaacgtgcctgcccgtcagcatcatatccaacgctttgctggcaccaatcagacggggtaagcgctgggtacccccagaaccaggcagcaaacccaactggacttccggcaggccaagcgccgttttgtcatccagagaacagacgcggctatggcaggccaaagccaactccagcccgcctccaaggcaagcaccatgaatagcggcaaccaccggcaccgggaacgcggcaatctgtgccagcgtgctctgccccttcttcgccagcgcttgtgcctcttgggccgtatggcacgcggcgatcatggtgatatctgcaccggcaataaaggaatctggcttgccggagaggatcaccaacccttccagggtagcaagctgctgcgccttgagcagcacgtcgttgatctgctcaacaaactctgccttcagcgtattgaccttctcccccggcacatcgatggtgatcacgccaatattatccggccgcagggtcagatgaaatgtcgaaggcttggcacgctgctcgtgcaatgcgttctcgaaactcatttttccacctccacgatcatcgcagctcccaagcccccagctgcgcaggcagtggccagccccagaccgccaccgcgccgtttaagctcgtgtaacgtctgggtgatcatgcgcgcaccggtcgcggcgaacgggtgtccgtaggcgatagagccccccaacacgttgaatttatccatatccacctcgccgatcgcctgctcacgccccagcttctgctgggcaaactcggtgctggcgaacattttcaggttggccagcgtttgcgccgcaaaggcttcgtgcatatcgatcagggtcaggtcggccagggtaataccggcacgatccagcgccaacggggtggcataggaagggccgagcaacatatcctcccagacatcaatggcggcaaaggcgaagctgcgcaggtagcctagaggctccaggccgagctctttcgcacgggactcgctcatcatcagcaccgctgccgcaccatcggtcagtggcgtactgttggcggccgtgacggtaccgtgtcggcgatcgaatgccggttttaagcgagcataagactccaggctggaatctttgcggacgttgttatcttcggccagcggggttttatacggcggcacgtaggcggtcatcacttcatcgcgcaacagcccctgctcccaggctttagcggccagttgatgtgagcggtgtgccaaggcatcctgctgctcgcgagtaatgccgtgggttttcgccatttgctcggcggtatcccccatgcgcagaccggtagagtattccgccacggcgggcggtaccggcatcagatcgcggaacttaagtttactgaacagtttcaaacgctgcgacaacgtgcgggccttgttgacgtccaccagcgtgcgggcaagcgccttgctaacaccaatcggcagcacggaggaagaatccgccccaccggcaatgccgatactgatactgccggccatgatgctttccgccacgttggcaatcgcctggaagctggtggcacaggcacgtgaaacgctataggcatcggtgtgcacgctcataccggtgccaagtacaatttcccgcgcaatgttgggcgcttcgggcatttgcaccacctggccaaataccagttgctcgatcagggcgggatcgatgccgctacgcgccagcagctcgctcaccgccgtcttgccaagatcgaccgcaggtataccgtgataagcggtagcctgcttggcgaaaggggtgcgcagcccttgaacaatggcgatacggtcgccgagacgggtaaccagcggcaatgccttactcataaacgctcctgaagagaggccgtcaacacaacggacaaaaagaggtctgacctgatgaggtcattgttaaccaaatgtttacatttggcaaaccggcagaagtgaaaactgagagcgggagcaactttctggtagggggtaaagcggtgcggataccagcaggggcggatattacgcccctacgggatcgggtcgggattaacgcaggccgagctggaagatcatggtttctgcctggcaggagaaggtgaaatccacatccagttgcacgccgccgtcaaccggtttaatgctactgctgatgtcacaaggctcggactccacgccgcgcgccttttcagtcagtgctgccagggtttgctctgcatcttgctgattggcaaacactcggctgtaggaagcggtgcaatcggtgttatccatcacggttccgacatcgacacagcagcaggccgcagtttcctgagcgttacatttattgattgcatctgacatagttgaaatctcctcacgggccgcagttaagctcgcccaaatagccatttatgatctggcgcaaataaacaaaattctgtgtttattttactcctcgggcttgccaatcactagccttactttttgtaagcactttaagtgacggaaatcacataactaaatcgcttcgcggtaaaaaaacataagagttttgttatgtgcaggtcattttttgttatgtggatctcttttctgatatcaatctggaaatatttcaaaaacaaacttgcaacatcttaacaggtcagacctataattcagccactggtctgatttgtcagattgataacggaccctacaatcgcgcgctccatgttactttgtgtaacattgtttaaataataaacacataaaatgaggttttggtcatgagccagaaaaacctattcactaaatcagctctcgcagctgcagtggcaattatttcttcaaacgtatatgccgcaggattccagctgaacgagttttcggcagctggtttagggcgagcctattctggcgaaggcgcaatggcggataccgctgcctcggcaagtcgtaacccggcaaccatgatgatgtttgaccgcccttcgttctctgcgggcgcagtatttatcgacccagacgttaacattaccggcacttcaccttcaggcaaaagcctgaatgcgaataacattgccccgacagcctgggtacccaacctgcactacgttcaaccgctgaatgaccaatgggccgtcggtggctccgtgaccagcaactatggcctggccaccgaatacagcgatagctacccggcaggctctgtcggcggtaccaccgacctgaccacgctgaaccttaacctgagcgccgcttaccgtctgaaccaaaacttcagcttcggtctgggcttcgatgcggtgtatgccaaagctaaaatcgatcgctacgctggtgatttaccgctgctgttggcaggctcaggccaattacctccgtctctggctggccaggtagcaaaaatccctgccgatacccagatttcacatctggaaggcaacaagtggggttacggctggaacgcgggcgtgttgtatcaagtagatgaaaacaaccgctacggctttacctaccgttcagaagtgaaaatcgactttgacggcgactaccgcagcagcctgccctccgcttataacgggctattccagcagatcggcctgccaatggggaccaacggtaacaacgtccctggttctctgaccctgaatctgccagaaatgtgggaaatctccggttataacaaagtggcaccacagtgggcgatacactacagcatggcctacaccagctggagccagtttcaggagctgagagcaaccgacagcaacggcaacaccctgttccagaagcatgaaggcttccgcgacgcttaccgcatcgcgctgggtactacctacttctacgatgataactggaccttccgtaccggtatcgccttcgatgacagcccggtaccagcacaaaaccgctctatctctatcccggatcaggatcgtgcctggatcagcgccggtaccacttacgcgttcaataaagacgcgtctgtcgacgtcggggtgtcttacatgcacggccagaaagtgacgattaacgaaggcccatacaaattcgaatctgtcgggaaagcctggttgtacggtgccaacttcaactaccgcttctaatcttttttcttagacagaaacgtaaaacggcgggattatcccgccgtttgtttttccgttacccccctccagccgtaactcaggaaaggtttaccgtcgtgatgctgtgctccgttgacggtgcatacgactccggtttttgttccgcaatctcttcctgcgcgactacagcgtcaggctccgccaacggaacaactggctgtgcctgcggtaaagccgcggtcaacgcctgcaatgaaccaccgctgataccgatttcctgtagcagggagtcgataaccggggcgtgcgtacgataagcgagagcggcagacatcgcctgctcggccaggttgccgccaccgatcgaagccgctgccgcacctgcagcgccagaacggttcaacccatcaacctgcaggatcttgatcccgtcgatagccttcatcggctcaacggacttctcgatgatcgccggcagtgcctgcagcaacgccagtttgaacttcaggctggtctgatcgctggaaagcatgttgaccgcttcgttcaacgcgcgctgggtttccgcctctgccaagcctttcttacgtgcggcttcggccagttcaatgattgcagcggcctgcagttcagcggcctctttctccgcacgggctttcagcgtcagttgcatcgcctcggtttccgccccttgacgggcttcgatcagagcaacctgcttggcacgatcggcttcggcggtctggcgcgtggtttccacgttttgttccgctttcaccgcttcggtcaacgcatcattagcgcgcgcctgagcctgggactgctgctcggacttggcagcaatggcgatggccttatcctgttcggcaatttccgtcacttttttctgctcgatggcggccatttccgtgactttattctgctcgatctctttaacacggatttcacggtccgcctctaccttacgggtccgtaccgcctgctcacgctcgatttccgcctcctgaatctggcgctcggcggagatacggctctgttcggcctcacggcggcgttccgcttcgaaggtggcgatccgggagctttgctcggcgctgcgggtcttgacctgctgctcctgctcaagcgacatgaaggcttcctgctgctcgatctccagcttgcgtgacatggcatcgcggtttttctcgcgtactgctacctccacgtcttgctcaacttcgttacgctcgcggcgacggcgttcggtttcctgcgtcagcttggtcagaccttcggcatcgaaggcgttgttagggtcgaaatactctttcgaggtctggttaaagttggtcagcgacacgctttccagctccaggccgtttttcgccagatcttcagataccgtgctctgtacgccctgcacgaagttttcgcgcgtgtcttgcaggtcttgcatggtcatctgcgctgcggtggagcgtaaggcgtcgacaaacttgtcttccaccagttggcgcagatcttccggtgacagcgtacgctggcccaaagtctgtgctgcggtggagatcccttcaatggtaggttgcacacggacgaaaaatgccaccactacgtccacgcgcattctgtccttggtgatcaggctgtcatgcatggcacggctgacctccagcttcagggtcttcatgttgatttcaacaatctcatggaacacaggaagggagatggcaccaccactcagcacgaccttgagaccgcccagaccggtacgaaccaacgactgttctgccgaggcacggcgatacaggcgcgaaaaaatcagtccaataatcagcaggacaacaaagatgccacccgcaatcgacccccaaaacgtaagaccatcactaattatcactagggctacctctccgtaagtattatcaaaataattccgttaaaaccgcgttcacagcagatccggccaagggttggcactgccgctgaaacgggacccggaaatgcgggccgtcaccagcaccttggctccacgcacaaaggcgacgtcctcctcatccggttcgatcaaaatgtaatgggtacgcccgtgctcgtcagtcaccctggcttctgccggggtacccgccgtggccgtggcaccggtcataattgccatgcggccaataaagctgtccgtggaaacggcgctgctctcgtcacgtggcaagtagcgagcaatgccgcggccgcaccagcgcacgcagaatacggcgaagagaaaggcaacgatcaccgccagccataccggtaattcaccgcctgccaaccattgcagtatcaggccactcagtgaaaaaccgccgagaaacagcacgatgatgaccagcagcggcaagcgcccgatatgcagccagctcagaccctgggcgaaaacgttctcacccagggtaatatccggatgggagtctatagctgcgtcgaaatggctggaaagggaagcaccgagaaacaccgccagcgtttccagcacgccgataaacagcagcaggagcagggcgatcaagaaaggggcattgcctgaagaaagtaggtccatattggcattctccgtgcgcatcactgcgaaaatatcgcggcagcagaaaacaggcaggaaagaggggacaaaacgcggtaaaaggtgatgcagcaatccgctataaacgatccttgttccacacaagccggttcccaagccacgggctctgccctccatgtaaccagcggcagtcgcctggcgcagattttagcatttactgcaccggcatcccagaaaatcctcaagaaaaatgattatcatttacataaataaaaaaggatccccaaacttcctggatcctttttcaaacgctattcaccacaggataagttgaaaaaaacctaatccttagttggcagagtcgatctcatccagatcgccctggatcgccttggcatttgggttctcctgcggcttgagcaccccgccctgcgccaggaagtcatggcgttggaagtaggcgtcacgcaccatcacataaggatcggaagagttgcgcagcaacccatcggaatccagcagctgagcacgggtttcaaccccttccactacccatttacccgccgacatccagaaggtgaggtaactcagcaccggataaacggtatctgcccagtcaccaccgtcttcacggatggtgaagctaccgtaaaccggtaagtgaacatacgggccgtaacctacgccgtagttccccaaggttccaccgaagcggcgtggttcttcacgcgccagtttcgggttagccatactggccacgtcgatcaacccgcccatccccaacagggtgttgaggaagaaacggttgaagtgcttcatgccctgataagggttaccacgcagaaattcgttcaccatgctggctggctcttccaggttggaagtaaagttgctcaagccattacgcgcaggcgtcgggacgtaatcgcgccataccaccgcgaccgggcgcagcacgtagggatccatcacgttatagttgaagttaaacatcgcccggttaaacccttcaagagggtcggaacgcccttgcggatcgtcaccaggcgagctggcacagcctaccaataacaccgttgcgaaagccagcccagtcaggcgaaagttcatatatttctccatgaaaacccttggattctttttatcagggaacctgtttatcaatctgaacgctgacctgctccttgccgctataggcttgcagcgtactatcgccaaaccagtcgcccgcctgcggcgttgccagaccatcctgtgacagcctgacatgcaccttcaccttctgctgagccgaaagcaggcgttcaggcatcatggcgttgctgtcatccaatgtgaatgatagcgggaaacgactaagtggcaattgcttgaccgctaccggcaccgggttggttccatcggtaaccgaaacgatcagcgttccttgttgtggtaatgcttttgccgcctctggcgacagcgtgacagtgacggagagtttaacagtttctgcgcccacctgaacttttgcttgttcaatgctgcgctttatcactgcaacacgctggtcatcggctggtaacagtttcaacattacctgccaggcaccgatcgcctgttggtaatcgccctgttcaaaggagttgaacgccagcaggctcagtacgcgcacgttggtgtgatcttctgccaccatggtgcgcagcatcgcggtcgcctgcttgttgtcttccggatcgccagagcgcgtcagcacttcggcataacccaggcgcacttccatattgctcggatccaggctgtaagctcgagcaaaagcctgggtcgcggtggtggcattattcaacgccattccgacacggccaagcatcatccagtcattcagatttctgtcatcatcctgcaatgaggtgcgtaatcccaagccaagacgagcgatctcctccatgctcagcggctgggcacgttcattggccacccgcgcacgtagttccggcatttgggattctacctgatgccaggccataacctgagccaaaccgccagttttcagataaaagccaaccgacaccaccaccagcaccatcacgccaggcaccagagcccaacgattgatgggccgagcaggctgctcatccggttgtccagggatatcgttcagcaagttctgttgcagctctttgaccagttcagggcgttccgcaaccaccccttgatcttcatcttgtgccagctcgtcgaggcgatcctggtagaacgccttattgagcgtatcgcggctggccgccgtactttctttgccttggcgcatcacgggcacgaccagcaacgcgctcgcaccgaccaacagcactataattatcagccaaaaagccattagggtttcttcctgtcagtctctttcaacaacgccgcaagacgctgctgctcctgctcggagaattcctcgttgactgcgcccgtgcgacgttgacgggtacgcagtatcaccaccgccccgccaatcagcacaaacagcagcggcccgacccacaagatcaaggttgctggcgtcaccgggggttcataggtcacaaaattaccgtagcgcgccaccatatagtcgatgacctgctgcttgtcttgcccctgcatcatcagctcatacaccttggtgcgcatgtccgccgcgatgatggcgttggaatcggcaatgctgttgttctggcatttagggcagcgcagctgttcggtcaactcgcggtattgctgctcctgctccaccgaattgaatttgtaggtgtcaatggccgcagcggcactccagctcagcaatgccgccaccagtaaggttatcagcctcatgcgtcgcccccatatttacgatacagcggtaacacttcctgctgccagacacgctcgttcatgtccccggcgtggcggtagcgaattatgccttcaccgtcgatcaggaaggtctccggtgcgccatacacgccgagatccagccccagcatgccgtcgccgtcgtacaggctcagcgcataagggttacccaactgattgagccacaccaccgccttctgacgatcgtctttatagtttagccccactacgcgaatgcctttggccgccagagtattcagatactcgtgctccgcccggcaagtagggcaccaggtcgcccacacgttcagcaatatcggtttgccagtgcgcagcaccgcctgatcgaaggttttacccggatgatccaaggattcaagcttgaaggtcggcaccggtttaccaatcagcgcagactcaagcatggtgggatcttccccgccggcgttacgcgtcagctgtaccaacaaggccaccaccaacagcaggaacaggattaacggaataaataacaatttgcggttcatgcctgctccccttgtttggcttcacgtttgagttttttgctcatgcgatagcgcggatcgagaatacacaacacgccgccgatcgccataaacaccccaccgaaccagatccagcggacaaaaggtttgtagtaaagccgcacggcccaggagccatcgtccagctcttcacccaacgcggcgtaaagatcgcgcgtcaggccaccgtcgatggcggcttccgtcatcatgctacgcgccacgctgtaataacgtttttccgcatgcagggtggcttcggccttaccgttgcgggtgacatcgataatcccgacgccgccggtatagtttgaaccacggatatcgtgaacgtcgcggaagatgaagcgatagtcgtgaatttccacgctatcaccggccttcatgcggacatcacgctcaacgctgtagttttggctgaaagcgatcccgatcaccgtgaccgccacgcccaaatggcctaataccatgccccaatggctacgagaaaggtgcctgagcccctgccaaaaaccgtggcgatgggtggctcgctcatgcagctccatcagagtcagcaggatcacccagatggccatgatcagcccgactaccgtcatgccgacgatactgtcttgcagcagccaaggcagcaggatcgacagcaccagcgtgatcaccagcgccacgcccaggcgacgccagagcttggtgggttcgtcacgacgccagcgcaccaacggcccgatgcccaacagcagcgcaagcggtgccatcagccaggtaaacatggtgttgaagaagggctcgccgatggaaatactgcccagccccaactgtttatgcaccaacggcaacaaggtccccaataacaccaccagcatggcagcgatcagcaagacgttattgcccagcaggaaggtttccctcgagaaggtttcgtgctgcacccggctacgcacctgcccgcccttcacggcatacagtaacagcgagccgccaatcacgatcaccagataggcgaggataaacatcccgcgcgccggatcggaggcaaaggagtgaacggaaaccagcacgccggaacgcaccaggaaggtgcccaacagacacagggagaaggccgtgatcgccagcagcaccgtccaggctttgaaggttccgcgcttttcggtaaccgccagcgagtgcatcaaggccgtaccggccagccatggcataaaggaagcgttttcgaccggatcccagaaccaccaaccgccccagcccagctcatagtaagcccacgctgaccccaacacgatgcccatggtcaggaagacccaggccgccgtagtccacggacgcgaccaacgagcccaggccgtatcgagccgcccggccatcagtgaggcaatcgcgaaggcaaaggccaccgagaaccccacgtagcccatatacagcaacggcgggtggaagatcagcccgatatcctgcaacagcgggttaaggtcgcccccgtcgatcgggaaactcggcaaggttcgggtaaacgggttggaggtcataatgatgaacagcaagaacccggcggtgatcatccccatcaccgataacacacgcgccacggcatcctgcggcattgcacggctgcacatggcaaccgccagtgaccagcagctcagtagtagcacccacaacagcagggaaccttcatgcgccccccacgttgccgcaatgcggtaatacaccggtagcttggtgttggagttggcggctacataggagacggtaaagtcattggtaataaacgcatacaccaggcaggcaaatgccagggcgatagcgataaacatgccataggttaacgggcgggctaccgccatcatgcgcgtatcctgacgcgccgctccccattgcggataaatgctcagcagcaacgaaatcgccaacgccaggcacagcagaaaacttccaagttccggcatcatgacttgttgcccccgtccggcgaattgctataggtagcggccgggcttttatgattctctttcatggcatccgcgacttctggtggcgtatatttttcatcatgtttggccaatacttcgcgcgcattgaccacgttaccttcccccagcacgccttgtgccactacgccctgcccctcacggaacagatccggcaaaatcccgttgtaggttacttcgatggccccgcgggcgtcatacaccttgaagctcacctgcaggctttgctgatcgcgtttgaccgagccaggcatcaccatgccaccgatacgcaggcgctggcccacctccggcttttcatgcttttcgcccttgccttgcaggatctcgcttggggtatagaacaggtcgatattggagcgcaaggcatacagcatcagcgtggcggtcagcgcgacgccaatcagtacgacaatgaccagatagaggcggcttttacgacgtggattcactgtgatttctcccgcgagttaacagactgcggtatggctgcggattgctttgactgttgtgactggcggatacgccgttcacgtgacgcttggcggctgacttcagccagtagctgcttgcgctgccacagggtgtggatcaatagccccagcagggaaagcagggttacggccacggccaaccaaacgtaaaacgcgtagccgcccatggcgaaaaatgcctgccaggaactgaatgcagcattcatgactgacgctccttgttaaccagttcggcgacccaagggcgctgacgttcctggaaaaggatcaggttgcgcaggcgcatcaaggtcagcgtaataaagaacaacaggtaaccgaagatcgcccaacgcagtgggtagcgcatacttggcgcaatgctctgctgcatattggttgagccctggtggagggtattccaccattcgaccgagaagtgaatgatcggaatgttgatcacccctaccagcaccagaataccggcggctcgccccgccaggcgacgatcgtcgaaagcgttatacagcgcaatgatgcccatataaaggaacagcaataccagctctgaggtcaggcgtgcgtcccacacccaccaggtgccccacatcggtttaccccaggcagatccggtgaccaatgcaataaaggtgaacaccgcgccgaccggagccatggccgcgaccacggtatcggacattttcatctgccagaccaggccgataaacgccgctatcgccatcgagccataaatgcccatcgaccagatggccgccggaacatgaatgtacatgatacggaagctgtcaccctgttgataatctttaggtgcgaaaccgaagccccacacccagccgaccagcagacagatggcgcccgctatccccaaccaggggacaaagcggccacagacatggtacagccgttccggcctggcaaattgatgtaaccatttccacattgtcgtcattgctcacggtaaaaaatcattcggtagccgctccctgatggcagaacggcgaaagtcttgcgcacggaaaagctcttacaggcattcatccgcgattaaatttccagctagtgtacgcttacacgcaacgcagctgcggtggcaaaaggcgccagcgtgatgctgcccgccaacatcgcgcccaggatggccaggtaaccgtcaatcggcatccccatcgaggcggcatctatcgccgcagtagcaaatatcagtaccggaatatacagcggcaacaccagcaaactcagcaacacgccgcctttgcgtagccccaccgtcaacgccacaccgatagcaccaatcaggctcaacgttggggtgcccagcagcagggtcagcgccatcgccatccaggtattcacatccagcgacagcagcagcgccaccagcggcgacaggatcaacaacggcaacccagtcaccacccagtgagcacacactttgcctaacaccgtcattggcagttgcgttggcaataacaatagctgttccaatgagccatccaggtagtcatcacggaacaatcgctccagtgaaagcaacgaggctaacagcgccgctacccagataatccccggcgcaattcgcgccagcaattgcggttctggcccaacgcccaacggaaacagcgtgatcacgatcaggaagaaccacagcgggttgacgatctcggagcctttacgaaaggcaattttcagttcccgccgcagtatgataaagaacatcaggcgatctccgcgctggtctgtgtcaggcgaattttccttaccgcctgccgtgttccggttaaatcttgatgcgtcgttagcaacaccataccgccctgttgtgcatgttgctcaaacagcgcggtcagctccaacacgccctgcttgtctatggccgtcaacggttcatccaggatccacagtgggcatttgctgagccagagccgtgccagcgccacccgccgctgctgcccggcggaaagctgcgccaccggtacatcctcgtagccgaccaggcctacctgctccagcgcctgccagatggcctgacgatcggatgactggctaacggcctggtaaaactgcaaattctcaaacggggtcagcatggatttaatccccggctgatgccccagaaacagcagatccagatgatattgctcacggcgatgacgcgtattttcgccctgccacagcacttcacccgcgtctggctgcgccaacccggccaaaatgcgcagcaagctggttttgccagccccattagggccttccacctgaataatgtcccccgggctcaccaaaaaactcaacctgtcaaacagagtacgttcatctcgtacacaactaagatttctggcttccagcatggaggactcttatttttctttgggatagcgaatcatagcataagccacagtgcgctcgaagcccgcagcctggcttggatgtactccattagaggtaatattgcgcatcagatcaaaattgcgtagaaaaaaacagcaacgttaaaatttcgttactttttaatcattttcccggcgcactttccttcgccccatcagcaactacgcttagttatcagccaataggagaatgaccgttgagcgtaaaaccagatcgtcaagccaacagcgatgaaagcagcgtcaaggtcgaaagcgaagagcacgatcggggcaaatccaccattgaggtcgatgagcaaaaactgccctcgcgcgccgctgccgtacatgaacaaatccgcatggagggggagaaagaactggagcgtgactggctggcgctattgctgtcggccttggcggctggcttgtcgatgggggcttccctggcagcaaaagggatttttcacgcacggctaccggatgacccaagccggttttttatcgagaacatcggctataccttcggctttatcatcgtcatcatggctcgccagcagttgtttactgaaaacaccgtcactgcggtattgcccatcatgcataaaccgacgccgaagaacttcgttattctgttccgcttatgggggatagtgctgttggggaatctgctcggcaccggcctggccgcgctggcgtttatccatatgcctatttttgatgagaatacccgtgcggccttcaccaacttgtcgcaggaaatcatgcataacaccccgcgagagatgtttgccaacggcatcctggcgggttggatcatcgccacgatggtgtggatgttcccttccgccggggccgccaagatctgggtgatcgtgctgatgacctacctggtggcgatttgcgaccttacccatattgtggtcggttccgtcgaaatcctgtacctggtgtttagcggcgcactccctggcaggagttcttctacccgttcgccatcccgacgttggcgggcaatatcatcggcggtagctttatcttcgctctgatcagccatgcgcagatccgcaacgatatgagtgacaaggccaaggccgaacggctgaagacacaacgggagaatcaacccaggaaggaacgcacggataaatcagaccgcgaataaaacttctccaacccgttcgcggcacatttaaaggttgataatcgggaaaatggggcataacgggagaaaaccgattatatttcaggcaatcagacctatagccccttaaacccaagcgcaaaaataggtatactgcgcccgccgtgtccccttagttaaatggatataacgagcccctcctaagggctagttgcaggttcgattcctgcaggggacaccattagcacgtctcataacatcccagaatgtctataaaatccattaaaaacaaatacattagctagccctacgtctagtgatatccaaagatgtttactggaatctacgtatgtttgtgtataaaattgcgtataactccaggttcgaagtttaggttatacacattatgctactcacagacgtacagatccgccgctctaagccccaagacaagccctatacgttgaatgatggcaatggtctttcgcttcttatcgatccctctggcaccaagggctggcgcttccgttaccgcttcgctggtaaggcaaagatgatctcctttggggtatatggtgacgtttctcttgccgaagcacgtaaaaaacgcgatgaagccagacaccaactcgccaacaacatcaatcccagtgatgcgcgccgggcagaaaaaatcgctctgacacattcaaatatcaacacgtttgaagcaatagcccgcgaatggcatggctcaaagttacccacctggtcaacaaattatgccaatgacgtaatacgtggttttgaaaacaacatattcccctacatcggtaaacgtccgatagaccagatagccccattggaattacttactgttctacaaaagatagaaaaacgcggagcattggaattaacgggaaagattaggaggctttgcggcgaggtattccgctacgcagtggtcacagggcgaacacgctataccccaccccctgttttagccagtgctttaaacaagccaaaaagcagacactatcctttcctgactgaaagtgaattaccggaatttatgcaggcgctcagtaactaccagggcagtatgttgacgaaatacgccacacagttgcttattctgacgggcgttcgcactatcgaactacgtggggcagagtggtcagaatttgattttgataatgcagtatgggaagtgcctaaagagaggatgaaaaagcgccgtcctcacctggtgccgctgtctagccaagctttagagatccttgcaaaactcaaagtacttaccgggcgttataatctgctcttccctggccgtaatgatgcgcgtaagccaatgagtgaggccagcattaataaagtgatcaagatgcttggttatcatggtcgagccactgggcacggtttccggcatacgatgagtaccatcctacatgagcatggctttgaaagtgcatggattgagatgcaacttgcgcatgttgataagaactcgattcggggaacttataaccatgcgcaatatttggaagggcgtagaactatgttgcaatggtatggggacaacataaattaaccccccccccctcgaaataactgtgcccaataccgcttcatttgtctatttcagattatatttaccagtgaagctgtatggtagctggttctctttactgggaaagagaagttgcaagcgtacaaaagcctaatgtaaggtacagcacaattagtctcagctagttaactattaattacccttaatataggcacgaatatataatgagtaaaacccaaggttaaatctatatacttaccgggcacaccccttctatcttattaaacaaacgataatatccaacccataattaataattattccaaaatacgatttagaatataaagatattcattaatacgaccactccataggtggtttgacttggaaatatagccaacaagagcatctgacaatctacttctagagtcagttacaaacttacaatcaggtattccattatcaactatagaatgaagatattcattaaggcttccttttcgtgtaagagtatcaacttcaccatttgcataaccgcttataatatccgttacggcaatattattaaaattgcttgcatataccaaattctcgaattcatcaattgttatatagaaaattctttttttatcaatccatactttgccaagatcattttcaatacactggaatagttttttatcaattaattcatcaaccataacaccattagatatataatgatctctatgagttataataagcaaggaatccaactcactattttcataaaagtcggtctttgataaatgacttgcgcactcttgtccttgattaattccctttataaaactattctttaatctgtcctttaaaaatcttgatgtatttgttgatttaaccactaagtctggttctattgccttagattcaataaatactgttgatttatcatatttcagcagaaaatcaacagacttccctacaataccattctccttatataattcttttatttccttttcaaaaactacatctccatttatttctttgataatattgcctatatatgcctccattaatttaccaaacttgttcttgtagttatcaatattatattttaatacatttggaaccatgcttgacaatgctgacttcaatattttcttacttaaaattagtaacccatcatctgtaatgataattggtttttttaacattggcgtttctctaaagtactcaacactcaactcatcttcatctttgtatgcacccatgaatgctctgatgttatttaatttaacactaacaaaatcaagatatccttttaaagactcaaggccaaagaatggatacaaatgtataataaagtgttgataaggaattactttcgaatcagcattgcaattatcgctgcacataataataagatatgcactaataatataaaaatcttctaatttaacgcgtgttacttcataaaaacaatccttgtaataatttgattcactacaacagaaccaaccatattgccgagataatgtattgatatcaaatttaaatggggattgatattgtagttgcgaaataatataacgtcgcatttccaatattgcattgctatcttcgcttaaatcaattgcatcatcttgcaataggtaaacactatttattatagaaataaaatcactctcagataagtgagtggtatattttttgtttataaccgtaaacttccacttcaaagccaaaaagcaacaccatggaaagttagaaatgataccatcacttggttcgcgtgcgcgcttcatgtgtaaaaacatcttttcaagaaatgattcatctgaataacaagataacttcttttttattttctctactctttttttataatgattattctttttagtttccaaagacatcccaacccctttaaaaaagaaaattatttttaataccattgtcctcatctggggacgattctagataacaatactacgcaattctatactgtaatccaataattactgaatcggcaataccccccgcttttgcagaattgcttatgcctgctatctggtgcacctgtacgccttcctgagcctctcgataccctatcggcaacgtcacatcaacgaaaccgcttaacctcacagcgaaccgcctacgcctcagaatccccatgacataaacccgatccccacggaaacggcactacaccgcacccgcctgcacactttggatcataaaaatttttcagttttatttttctacaaaccaatccgccaggccgcgccacacctaggcttctgcgagaaatccccaactgaaaagtttgaaaagaatttcagtgtttttcagttttggcttccagatacactactgcatgacaaaataacgcattgattgtattaagttattttattttacgcgggagcggcgggaaaaaaaaaagccagcggcacgcggaaagaaaacacaaaagccacgctgggcgcggctttgcggggattgcagaaaatagtccaactgaaaaaggttgtaagccaagctcccgacatggcctctacgacttggcctgtaatggcattactgacctgccacgtaattggcgtgcttgcgccgcgtaacgactggtttagtaggatcgggcattctggcctttgcctcttgtgcatccttctcctgggccgttttaagccactctatagcattcgcccgttgatccggtgtgatgccgctcattatgatttgcattatcttaccgtgcgtcaacgcgccagggcataaggtatgggaaaacgtcacattagccacaaaccgatgaccacactcgggattgctgcatgtgcagtacacatcagcaagcatcttatgcttgcggtttgtcttagcaataatagactttgactcacaatcaggacatatcactgtaaatgctgccattctttttactcctttatcttttaacaccgccagccaggaaagaagcctcagccagcctgatttcatcttctctttatcctttttgactggtaacaatggtaacactggtaacgtcattgatttaaaaggataaaagctgttaccacttcactttatctactggtatcaactggtaacagcggcaaaacgttaccagtgttaccagtaggtttatttcactggtaacaccgccaagccttgccacacctggttgttacctctgttaccagtgttaccagtcatagataagactcgcgtaagagaattaccccaagacgctgctgttgaactgataaacccgtttcagccctatttctggcaggcgtatgtttttctgtgtccgggtttcatcttccggcacctccaggtaacccgccgccacgcataaacgcgccaccttcttggcgtcgaaccccttgcagatttctttccaacctgacggcaacacgtaaaacgtggtcaccgcctcttcctggttgtcgcctttcttcacctggcgaaagcccaccatattgccggggcggctttgggtatcaaaccaatcggcaaagcggctaaactggttacgggtcataaattccctgacctgttccagcgcggcggcatcttcctgattggcggtgtggccccggtcatacatccatgcagccaggcagcttttggcggcgtttagcgcctcaccttgcgcccaaccggtgatccccgcctcggtggccaattctccagccatcgccaccagagcaaagcgtgtgactgctcgccctacctggttccccgcgttttccggagtgagcaaccgggtgtactctttcagcaaggcttttgccttatgcgtcatacccggcaaatccgccgtcaagcagcgcaaccactcacggaacggcgctccgtggcttgcggtcactgcctgctccagatgttccgccaacgccttccccccggcaaagccgtgtaactcctcaaacacgccatatttgccggtatcgctggggatctggatcatcctgacctcaaccccggcgtaggtacgttcgcccacgttggccgcgtgctcgaccagcgataactcaccggtagacaggaacagcaagcaccaacggttggtctcccgcacgctgccatccgttcgggcgcgcgccttaccctggccattcgccaacatgtaggcgatattaccggcctcgcggccatctacttcgcggatctcatccagcatcaaggtcgcgtcattacggcggctggccgtaccttccagcgcgttaccggtcgcacgccaggtatgccaaaaatcggtgccaccgcagaccgacgccgccactttcatggttgtggtcttgccatcggttgattcccctttaaggtgataacccccgccaccgacgccgaccagttttaacagcggcgcggcaaaagccaggctaaccgcgaatgctacccgcccattccctacgcagtaacgcccaatctgttcgcgccactcatccagcgtgccagcctggcggaaatcgcggccctgaacactggaggtttgcaggatcaccgactccgcaccaatgccgatcacttcatcctggagcacgtaaaccgaaccatgccagccggttttagtaacacacgtcaccttacgttcgggtttgcacaacgagatatactccatcaggtgcgcccgggcctggccgttgatattgatgtatgacaacccattgaccaacagcacgcgccgcagctcctcgccaccaccacagagcatttccatcggcatcgcccatttacggctgatcccgttggtatcctcccactccaacaaacggccatagttactgccatcttcatcacaagtgatagcggtaacccgtagcgggctgcacagtttgatattgcggatctcggtatcaccatccgacttgttcaccagcttgtcgtaccacaaatactcctgggtaagccggaacccctgcggcagcttggttttacccttaccaaacaggatcatctcctcccgaaaggcttctttggcacgctctagccccagttcctggcgaaaatcatcccaatcggctttgtggcgggtaggcggcaacgtcacccacccatctaccgccttggccgctttctccgcccacagcttgccggtgttctctttgccatcgtcaaagtcattgtctcccgccacaatcaaacgggcttccggccacgtttgccgtagttgctgggccacattgatcaagttgctggccgcaaccgcagcgacaaccaccccctcggttaacctggctatggtcaatgcggttgcatagccctcggtaataatcacttgttccggtggcccttcccctggctcattaacggcaatgaatgcgccggccaacagcgaatttggtaaaagccgcttttctcccagggggtggatcaactgcgccccacgcagttgcccggaaacgtctatcaatggcaataaaagcgcccccacagggaactctacgccgccataagccgccgtctgtccaatctgtgttaccgtctgcccctgtagacctcggtttgtcagatacgggctttcacccgttgagctgcgggataacaacgcctgatagctcttttgtaccttggccagtttctgcgtgtccgaggcttctttcctggcaggcaaaatggggggctgttgcacgctgggcaaggctaacgcctgggccacttctttcgctgcactggcggcatcgatcccggcaaccagcttcaccagatccagaccgtcaccatgctggcaatgtgagcatatccatgtgccacgcccatcacgatcgtcaaaacgaaagcgatccgtgccaccacatttagggcaagggccatgcttaccgttggcgggaacggtaatccccaacgcggggagaatatgcggccagcgccctttggcagcgttaatggccgctgtaaccggttgttggctcatcagtgcgcctccctgacgttacaggcgcacaccgacgacccgggaggcaactcaccatctggcgcaccaaatataatatctcggtacacctcgcaaagccgatgataaccatatggggataactgaacttgtgcggccataaatccaggcatgagcatggccatcaaatccgctgcggccaattgcccgccatccatgacgccaaaacgctcgataaaaggtgcttcaatatggtaaatgatgttcaatgcaaccttatccagcgttaactcaacctcctcgccgtcctcaataaataccgcctggccatgtttaaataccatcatgtcgataaaggcgcaggaaatataatgacgaagcaaggcaattttaaattcaggtgatgcggggtgattaattgatagcattatctttcccctgtgttctcgcagcattaaataaaccgctgttatcaatagcgccatccatttgcacggccaagcattcaaacagagccgcaacccccaaagccgaaaccattttttgattgctgtttccctggttactcatcaagtcggccatcagttcacatactaacgtggcacgaattaactgctcacagcctttatcattcagggaatgtaacgccgtattatgagtcgtattcatttttcccccttagcgccattcaacggcatgacgtgacggcaggcgaccagcaaacgccaacacatactctctaaccagcgcacggtgcgcggcctgttgggaatcggcagtaatttgtatacgctggggtatggcttgaatatcggcacgacgaacggccagaaacagataggtaaattggggatgtgagcaaattggggtagtggccatggcggcaacctccttcagatagcataaacagctaccaccggggttcctacgcccaagactggtggtagcccaaacgggggtaggaataccggctctgaaggataccggccagcccgagagctgccccgcctggactaccataacgccgtggtggtgatgcacacaggccaaaataacgcccctacagccctgtgagcaccacaccaaaaactttaggtgagtcaaagctacgatacaaaaaaagacgcatagggcgtctggtatcgccttcagattacacgggttcctacgcccggctgccgattttgcggcaacggcgaaactataccttgtggcggctaaatcctgcaagccgtttttatccgaatacccaagattgacagccgataagctgaatgcgatatttcgcctgacaataataacagtcattctttcctcaaccacgtttgttttgacaaaaacactttgattagcccgaaaccatttttatttcgggctttttttatttcaggtgttactcaagttaacagggtttattttcgtacgaggctcactgcattttcatccactgccgtataaaggaaaccatttcctaacgcatagccctcattacgccaatagccttgttcatacgtggcgctatcgtcgacaaactcagccctgaaatggcgactgcccttttgggtgtaaatatgcaaattatccagtgttgtaatcgctagacgcttcccaggcataaagggaggtacaaaagcaaaacgccctgccaccgagctggtgagcatctgagccgctgccatgtctgccggacggtctgccgcattaaacaagcgtaaacgctccgctgccgccagttccgcaccaaccatgacgaccaagcgcggatcctcacggaacccctctggaatgttttgcataataagatggttagccagtgcatccaggtgcggaaaatcaccaccctcacctaacgatacggcctcagtcatgacttgagaaccgttattaaaggctttcgctatagcgtgccatccaatattaacatcttgccctttagtattattttgtggatcggtaggataggctatccgctcaccgtttaatccaatacgcaacatatccagagaaaccgccataccaaagaactcagacacggattgtgtgaaatgttccattcctcctacattcgcaatcgcagacattttcccataaggcaaggaagcgcatgagtccgtttcgaccaagatataatctgttccgtttaccgccaagcttttattaaaacgcccttcaatagcacgacctgtatgtaaagacgagtcaccaatttctattgcctggcctttttctgtatcgacatccattaacgtgatgccattcatcatccaaccagattccaacattgcaatacgcagtttattttctgcaacgtctgagattgtgaatgttcgctgatgcccataagggaaagtgacatttttcattaaattttggtgatagcgttccgccacggcgggagcattaattgcagccatgatattttacctatatgtatttttttgaattaaagtgatgcgcgcatttcttgctgtttatctttcagatgtaacttcgaccccatcataagattgatataatcatcaacggccattacattacgccattcttcacccgaaacgctgtaatattccacagccagtagagcacggtctaaccccccctgattaagggtatatttatctgttggaggcgtgcatttattgactatcgcacgtaacgcattttccagggtatccattaatccccaggcatagatatgagaacgcagcccctcactatacattcccttgcggtaggtgtaggtcggtaaagtctcaagcggtaaaagcgttaatatcttgcccttaaaccccttttcaccacacatcaacatgtgctcgacaggttcacgcaacaatcccagcaaccctctacgagcggcaacaatggcgttagcttcaatgagtttcgtttgggttcgctcaagtctgttctttgcctggatgatggcttctttgatactaccattccaacgagagatatcactaacaccgcgtttggcatttcctagctcacgttcacacagcataatttcattttgaatatcggatactttagactcagcctctaaacaaattttttcaccttgctttatcagcatatgaatttcttgtggcgtacaatctgcgcgtggtggctcgtatcctgtcagctgtccaaattgctttaaaagcggttccattttatgcaggcgataaatttcaatagtgcgtattgcatacccgccatcaccatgtgattcatcgaatggaacaacatgataattagagacagtagctaattcactgtcatttcttgtgtacttgatttgattcactgaatgactctccttgatatattgttagcaacccaactattaatctcactctcaacccaagcgatagacctttcgcctatagacacactcttcggaaactcaccactcttcattttattatatacagttgatctttttagtcctgtaatcatcatcacatctggcaaccttattaatcgaatgtgaacattctcattatttacctgcacaacaccctccttgcttatgaattaaatataaaaaacgagtatagaatcacacttagagtaacttgtgtaaagccccctgcccctcacaacagttcaaggacaaagtgtcagatggaatatatacaaaccaatacgaacaaatacgaatagatgccaataaatactaaacatccgttaattgtaatgttttgtaagcgctatataaacaccctggaatctcgttggatgcctatagattaacgccgattatttttatgtaaagggggggggaaatagcggtgaggttataaaatgcactccactgatatcggaagggtgaggagttatcatgagttgtcaggagtcatatgtatgttcacatattataccgcagatctttaatgtaaatatttgtaatcttgaatgtaagtttttgtaagccacactcaggcaatataagaagcttaaagcatcaaccgcgagtggcgtttaaatagacaaggaataaattgtgagtaagtaagtgtataaattaaatttaaaattatgctttaaacgtttaaaatcaatttattacaccagaaaatacacttctgcaggggacaccatgttgatgccaacaaatctcccccacgcgagcaaaatccagtcacagcaaaactaaaagagaaaccctactacctgctcgtcgattcggcaatccgataccctgcataccatcccccgatcatcccgaccaagcgttctttcgtgcaaagcaaatcacagaatatcgtattttagttgtgatttttatcaccaaaacttattatctaatcgaccagtaaggatagcgctccttaacaaaatgaggaaatgatggttacggttcaatggacgaagaaagcactcaagcagttgctgtcaatcgacaccaggtaccgcaaagccatcagtgagaaggttaaccaacttgaagatttccctgccgtaaagctcgacatcaggaagcttcacgcaactgataaccagtttcggctaagggttggggactatagggtaatcttcgaaatcactgacggtgaaccggtcatctgtgagattgcagcaattaagcgtaggtcatcgaaaacgtactaaggcgggaaaacccgccctttcctcatatagctatctaaagtaaaaccaggagtaaccgaaaatggcagtgcaaattatccgcaacgataaaggcgaaccacagtatgccgtggtgccctacagcgaatatgaaaaactgattaacgcaaaaactgattgggaagatgtgccctacactgcctcaaaatccgatgatgtgaccgtgcctaacgcgatcgtcaagatcatgattgaccaggaagtttctcttctggcagcctggcgggtctatcgggacctgtctcagtatgatgtggcccaaaaactcggcaccacccaatccaccgtttcacaatgggaggcatcaggccgccctcagaagcgtacccgtgaaaaactagcggcgctgtatgattgctcccccgagcagttgatcccctaatcttgctcagtgtaggggggctgcaatgctccgccctttagataaccaatgggttaactcaggccgaacatgttcggcccttacaaatcagcacccatgctggcgctgaggacagggtatactgtgttatcaatataatgtgtgaccggcacccgctacctagcacaacctcgtacgttaagggtataatccaaggcattatttaatcggtttcggaaacgaacatggcaaagctaacattacaagagcagctgcttaaagctggattggtcaacagtaaaaaactggcgaaagtggaaagaacggcgaaaaaatcgcgggttcaggctcgtgaggcaagagaggccgtggaagaaaacaaaaaagcgcaggttgaacgtgataaacagctgaatgagcagcaaaagcaagccgccttggccaaagaatataaagctcaggttaagcagctcattgaaatgaatcggatcgttattgcaaatggcgatattggttataacttcacagataacaatttaattaaaaaaatatatgtggataaaacaacccaatctcaattgattagtggccgccttgccattgctcggctgattaccgataagaatcctgatggcgaatacgcgattatccccgcgatcgtggccgataaaattgcgcagcgtgatgcgagcagtattgtattaaatgccgaactgagcaaagaagctaaagatgaagacgatccgtatgccgattttgtcgtgcctgacgatctgatgtggtaagtactattgcctgacgttagccatactccgccatcacagcatcaataaagcagcgcagtttctgcgtcggataacggttcggcgaatacagcaaatgcatttcgcgcgaaggtgcctgataatctgccaggatctgcgtcaacaggccggaggcaatgtagcttctgagcaccacttctgcccccaaaataatcccaccgccgctaagcgctgcagacagcagcgccgtagcattatttgactgcaaacggctgttcaccttggcggcgtactgcttcccccctttggtgaaaatccattctttctctgaaggacgggaccagtaagtatatccgaggcattcgtgatcgagcagatcttcaggttgagctggaataccatattcggccagatacccaggggatgcgcaggcaattagttggtaaggtttgagtttacgagcaatcagtgccgaatctgccaacggtccaatgcggataaccgcctcaaacccttcatcgacaagatccacaaagcgatcgctcaacgtcaattcaacttgaacgtctgggtaacgacgcatgtagtcattcaccaaaggtggcaggctgtatgccccaaatgtgacaggcgcattaacccgtaacattccgcgcggcattgcggtcatatcctgggcaacagactcagcggcatccgcctcggcaagcacaattttgcaacgctcataaaaaatacgcccgacttccgtgaggttttgccgccgggtcgtacggtttaacaaacgggtccccaaatgttcctccagcatgctgatctgtttacccaccatctgcggtgacaaattcagcacctcgctcgcggcagcaaaagaaccgcagtccgtaaccttcacaaacaccaacatgcacttaagccgatccatcattccctacttttagtttcgagtatcgcaaccttacctctatttatcacataaaaatgatgaattacagtagccgaacttaatcaaggagttcacaccatgaaaattggcatcatcggcgcaggctttatcgcacgttcgctcgcagaacatgcgttggctaaagggcatcaggttatgctcagtaattcacgcgggccggacactttatacagcctgaaagtcgctctcgcgtgtgaaacgggaacggtgcaacaagccgtagaatttggtgatatcgtcgtcattgcgatcacgttcaaacactatgcgacagtacctgcggaggcgttgcgcggcaaaatcgtaatcgataccaataactattatcccgaacgcgacggtaatttcgtcgaactggatcaacaactcaccaccaccagcgaattgctcgcacgtcacctttatgcatctcacgttgtgaaggcgtttaactccatacgcgtcatcgatctggataaagatggccgcccacaaggggatgaacggcgccgcgccctgcccatcgctggggataatgaagatgccaaaaaacgggttagcgatttgatcgaccagtttggttttgacgtggttgatgcgggcgtactgaaagaaggctggcgttttcagcgcggctcgccgctctactgtgaatggttcaatcagtcacaattgaaaaaatctctgacggacctgacgcgagaacaggtaattgcataggcaacttcccacctgtaaccaggcagtgatgaactgcctcaccgctcaggatatttgccgaggtggccgtcatcattcacgccatcaccccagagaataacgagcgtttcgaacgccgtgatgtatatgaaatttcgcttcaggatgccattaaatataccgatggccccctgcgtgaaatagaagaaatggttcgctcggggcagtaataaaaaaaccgcaccggcacaggaataaggtggatttatggcaattaaaaaaggcatataaggaaagcagaatttaggcagggcattcatgaaaaagccccgaaaacggggccttagggtggattcaaacggtctgggcctgctttttatagatagaacggtaatgattgagccgttcgaagaagttatcgctctgttcacgcgacatattccccgccacgccgttagcatcgacttcacgtccctgaaactccaagaatgccaccgtagaagcgagaaaatccatgttgctggtgttcttggcatagacatagcacttttccaaagtttccatgatctcctcctcaacatttacaataaagttgacgtgccacaagcaggatgacaatcgctcgttaaatgtgctgcacctctaagaatactctcaaaggctaaaaaatatacgccatacgtgcggtgtgagcaaaaaatgggcagagatcgcataaatacctagcgcggcgaggacgactgcgcagcttgcaaaacttgctctgccgtcaccacagagccaaagtcgtcaagcaccgagtaaaacaccttcatgccagcactcaccgggcctttagtcgccgttaacgcaaaatcagcctgcccttttgggcttaccataccgttttccggcaccaaggtagcgactgcctgctgcttatcgcggcccaccgtcatttcaagcaatgtctggtgaaaaggcgtggggttgccgaccaccaacactggattgccaccctgttttgccaggctaaagcgcagttgctcctgaacgttggtcgtgttcaccgtctgcaatgaccgtggccggtagaataatttgatccgggttctgaacgccatctgcatctggctggccgtattggccactttcggcgggatctccaacacgttaagccaaaacaccgactcacgatcgctcggcagcgtgtgttctgccccggtaaacaacactctcagacgctgtgcccgcttcccgtccaggcgcaagattggcggcgatacggtaaacggcgtggcgattttctccggttccgcctcactatcaccattgtccacccagacttgcagcaatactgcggtgcggccttcatttgtcacgcgcaacgtcgcttccttatccttgccgttgacaatcaggcgcgtggctcccaggtatatctcggcgtggctcagtgggataaataaggccatcaccataatcactagccagcggccaagcctgcgatattgtgtcgtgaaaccatacaaagctgccattttcaccctacttataattgagcgtaaaagtgattgcggtattggccgtaccagcagttacggtattacccacctggaacaaaccagcctgcatcggaacccgatagttggccttggccgaactatcatagttatccagtagataaatagtgccaaacgtcaccggcagattgttgccacgtaacaactggatcccgacgcctcgggcgcttgaggttgcattcggtgccactacgccattggcggcatccagcacctgagtcgtggcggcaaagctgtaaccaatgctggccaagccggccgggcattggttgaacgccaactcaaaggctttacgccctgccactgtccccacgccgttgaactgtccgacgctggcctccggcagatcgacattcacattaggtgtcgtgcaggtgccgccgctggcgatcgtgccgccgcttttgaactgggcaatcatgtaggtgagatcgcctggcgcagcaataccgttatacgtctctaaatgtcgcagataaatcggatcgaacaggggaattgcgccagcggtcaggccggtggtcgttttcacaaaccgcacctgggcatcaacacccaaatagaagcggttaccgctgtagttgacggtgatagactcaggatgggtctgttgcccgccggtgccaatggtcagcggctgccagttggtcgttttaccattcagggtataacgccaacggacgatataccccaggccggtttttaccgtggtgttatacagcatgtaggtttgcccatcgaccacgatagtattacgcgtggtgtaaggcgggtagccctgtacgctaaactgcaccggctgctggtaggcgctattgggggtgcagttccaggcggtggagttgtaagagttgatccaaggacccagcacatcacccacggcgctgtctttgccaatctcaatggtggccgtatcgaaaaactgataataaccactgttacgcgcgcaactgaccgccagcccttcggcactggccgctccgccatagccaaatattagcaataagccaagaagcaagcgcttaccacgctgccggaaccccgcgccaagccagtacgtgaaaaaacgggtcaaagtcagtcgttgcttcattggcatattacctccaggcggcgatagtcagattcagccccaggcgatacggcgggcagttgatagggaaaacggcaactttctccggccccctccccccatttcacctctaactggcctttagggttgttgactcgcagtaagccttcaccaacctgaccgatatagcccacgctgcgctgttgttcgtcggacacgtttgcgccaaagggcaacggattaccagcaacgtctcgggccgtcaccaggatcgagtagccgctttcggtctcataacgtaacagcccgacggcaccggcggtaggcgcgatcttctggctggtgtatttcagctccacatccctggaaagccctttcggatccaactccacggtattctggcggtaagggctgaggtaagggaccaccgccttcccgctgttatccaggcgcagaccgctgtagttggtgatcctggcccccttggcgttttctgcctcgacgatcgccgaagtttcccccagcatcggtgtaaacaccactccaccgctataagcaaccaggccaccggacatattggcaccatattgttgataaccttggcctgcggaaacgctgcccccaacgaaggcataaggcgcggcccatgagccgttgacgccgccgctaacgctgttgctaccatttttagcatagtcgtagttggtaaaggcgctgtagttatactgccggtcctctcccaggctaccggaaagcgagttctgcaacccctggcgatccttttgctgggtatagctgctggtcaggttaggcgcacgcgagctggagcccaatgggatcgacagggtcagcatggctttgttatcccagtttccggttgccaggttgcgtgtccgtgcgaagttaaccccataattcagcttgttatagtgattgttgtagctaagctgatattcgcggtcagtctggtcatgatcccaataatcctgcacgttggcattcaacgcgaccgtcccaaaaccctccggcaacgactggctggcgttaatctggaaacgattacgtcgtttccaactgttatagtcagcaaagccgctatcgttactgtcgcgatcgcgcagcaacatggcgtcatccacgttgtaatacccagagctggaatagcggtagctggccagcgtgatgttggtatccaccaccggcaaaattttcgcataggtgagccgtacgctctgcccctgctcgttaggacggttatcaaactgcgtttgtgcctgggtaatatccgccgagagcgcgccaaaatcggtattgaatgccagaccgcccgaggcggccgcatagccatcggcaccgatcacgccggtataacccgtcagcaggttagtgaaaccatgcctcaaggtgcccaccgcaatggcaggttcctcgctcaccgaattattgcgatatttccccgccatcagtgaatagtgggttacacctggccgcagcagttcggctatcgaagcataggtgacggtaaagctacgttcggtgccgtcggcttcggtcaccgtgaccagcagatcgccgccgctgccggtaggatacagatcgtcaataacaaacggccctggcggtaccgtggtttcataaatctggctgccacgctggcttacacgcaccagcgcgttggtattggcgataccacgcaccaccggggcaaaaccacgttgggaatcgctgtacatacgatcgtccgagctgatctgagcgccaatgaacccaatgctgtcaaagacttgaccgtcggtagtcgattgccccagcaccatccggctacgccagccaaccaaaggccgctcaagataggtttcattgctttgatagcgaaaaccctcgtcatcattccaattggctgacgcccggtaacgcaaacgccacacgtcccagttcaatccgccacgcaaccccaaaaactgggtggtttgagcagatgagtcggaatgatcagcacggtaggcgttgtagtcatattgcagagtagccgccgtgatgccgttatcccacagctcagggctgacataaccacgggcttcatgctgcagcaaagactgcggtgcacgcacatccaaccgttggccaccgctatcaaaattgccctccacgccaggcaccagttcacccagcgcaatacactgttccccttgctgcaagcgtgacaacaccgccttgtccagtttatccaaggcaatgtcgaacagacttaacagtttcagatcgtagcaaggctgagcgatgctgctttgcggcgaagccagggaaaagttgacgtcctgccgccctttccattggtcgttaagatagagatcgatgcggtgaatgccgggagcaaccgggttaccgctggagaactggctgacatcgacggacgaacgcagaaaagactcgttgaactcaatagcctcggtttcatccgcataagccaacgccaagggagccagtaaaatggctccggcaatgtaaatctggttgagaaaagagggccgccaatcaagacttaccactgcccgccaacgtccgctcatttttgttatccccaccgaaatcatcaatcaggctgtaaaacgcttttaagcctgctgacggtgccgatttcattccttgaattttcatcaccaactcgccaaagggggccaccatcctttcctgcgttttccccagatcgcccagcactggcgcgcctttggcgctgcgaatctcaatctggcggaaagtaaggtaataaggcgatgggttcttggcgacgatttcgtaacccgcagcccctttgcgtaagctcagatccagtttttcgtaagcctgagccggggtcattggcaggttatccggccggtagaacagtttgatgcgggtacggaaagagaactgcatcaggttgtcgcccgcggctattttttgggaagccttgggtggtatttccaacacattgagccagaacagagattcacggttacccggcaatcctccgccggtacgtgcaatgcgcaacgcctgccctttacccggatcgatacgggcgaccggtggcgtcagggtaaaaggcaccttgacggtgtcgggtttggatttgacatcaccgttatcgatccaggactggatcaacaccgggctggtcccttggttacgcagttgggtaatcgcttcaccgctgttttcgttataaataatgcgtgtggcgttgatgatcacaccagcatcagcggcaactgtccatgtcagcgccaagctaagggcggaaacggtaaatagagttcttaacatggcgctgtcctctgaaagggatgaggctgcccccatcccacggctggatgtcttacaggtagatgatggtgtaatccacctgggtattaaccgtacctggcgtgaccgtcccgttcgcatagtattgcgcgtaataattcattacgccgccaccggagctgatatcaacggccaaatcgccttggctatgtgcattacccgccatgatgctgcccagattggcgttcaacagctgaacctgaacgttggtcgccgtacccgatgccgagttgttcaggcgaccggtgctctgttcaacataagcacctgcttcaaagaaggtgctggcagtattaagtgtagcccccgcacagttggtcagtgcgatactgaaaggtgttgcccctgctgttgccccaacggctggcagcgcagagatggaaatagtcggcaaagttaccgtggcgtctttagactggttgttaaccgaaatatcgcaggtagtgtcagtaatggtaccgttgatggtaatggtgccatctgctgccagggcagaacccgcaaaagtcataccgataacagcggccagcagggtagttttggtgttgtaaaatttcataatgatcctaatccgttacaagataactgtagttaaccaagcacattgccgattggtgcgcccgagaatctttactgtcatcggtccgttatttaccatcttgccgtacttgtttgtttccaccgttctgcaataactccgcaggttccgtggtgagcgtcatcagtcagtgacttaagaaaaatcccaaccacccgttgacgagaaaaatcttaacccgcaatcggtataaaagaatcattaactattaacctgcaattatttaggttttaaacctgaatttaatgttttagatcactaatttaatgcacaaagctctgtatggcctcattgttaagcacaaaaaacttgtttgttttatgttcaaattatacaaattttaaacaattcggcgagttattgctcatccgccaaaaaaccagactactgttgcgatgatcaggcccattcttttacttggcctcactgcaacaacggcaagctgtcgttctctaaccctgagcaaaactctattttgtgctcacgtacgatggtacagcgcacaaaaaacaggcggctcacgccagaaataaaagagcgaacctggttgctgcgtatcaccagtagatattcatctgcccggcattcggcttttcgttgctccacataggacaacatgtcctgattcagactggggccggggacacctgactgcgtggatgtcgacataaacaccttgcaactccccgccttgccaagaaatacctcctgtctggcaagcgaattggtggcgtacatcgtagaagcgatccccagtacaaagaccaaaccagcaaccccagcgatcagcccccaaccaagacgttttttgttaactggagtggcaatctctacgcttgtcggcagatcgggctcatcatccatctctgaagcgatagcaacatcatcgtcagtttcggcttccagcccgctctctactggcaaataggcctcattgcctactgtctgtgcaggaactagcggagtaaaatgtccatcgtcttcctgactgatttcaacctggatctcgcggcgtaacatgaaccctattttcggcacggtgacaatcacctcatcatcgatacccatcaccttaagcacccggcgcaacttgcttacgcattgattaaggttgttattgctggagatcatgccgtagtcgtcccacacctttttgaaaatcacctcccgttccacgggtttgccatagttggcgagcagtaattgcaaaaggcgtttggcaggattggaaatagaagtgggctcatcggaaaagtcgcttggacccaacgttccgctatcatcatcaaacagcacacgatcgttaaatctgtatttcatgttaatccggaccatcattgggcttataggataattctggcataagttcctaataaaacatcagtcaccgttcaaaaaagatacggtgcaacagtgctctcagcttgacggcctacgcagtgattttcctcgcgctttaagaacgccaatctctggcattgttgtcgccaaccggtcacaatgcggctcacttccccccaagcaggaaatatgatgccttgccactatcccgcccaatacgccttcgatagcgaaagcgatgcctggcaaattaccctacgcgatttccccgagcagcaggccgcctgctacaaacgtgaggacgttgaactggaggcgcaggaaagcctgctgacggctattgccattgaaatggaagaagggcgtccagtgcctacggcctccgcattacaaagcggcgatatcgccctgcatttgccggtgctggtaaaattaaagctggaactgcataaccatatgttgagcagcaacacgtcaaaagcgctgctggctcgccagatggggcttaacggtgctcagatcgatcggttgctggatgtggcctatgcctcgaaagtcgaggcccttgagcaagccctgtttctgctgggctacgaagtgcataccacggtagtggcgatccacctgccatcagaataaatagtttgcccagagagtaaatttttaccgttttgcgccgatagggttattaaacaaccaccgattgcaaagtgaaggctaaaaatggaactcaaccgtcgtcatgtctgggccgctatcctgctttcttgtctgatcttctgggctatcctgattgccagcgtcagcgccgtggcctgatgcattgctcctcatagtgaggcaaatcgcgtctccccctggcagggtaaaaaatcggcaaaagtgtgatcaaaaacacagtattgaaatgggtaggattttgggagtacattagcgccgatcctgttgcgattcctggataacctcaaggaacttgaatcgcaacgaccggtaaatcgtagctcaggacgttgttccttctgattgaagaacccgccatccgccgctgatttgccacaaaatactcagacaacaatcgggatcgttggtttgcgaggactccacaaggagttgttacgtgaaatactttttgatgggcgtttcattcatgctggttgcatgggtaggcaccttcatgctgatggttgcctaacagcaatctcaccaggtacatagataaaggggcgcttctgcgcccctttgttgtttctgcaccgcgaactatttgccgggcatcatccggcgcatggtgtcgtcaccccgcacatagtgatgataaattgcggccaaggcatggatgccgatgatgaaatatcccgtgtttgccaaggtttcgtgcaccattttcagcgtgcggcgtatgcccgcatcgggcgtgacccactgaggcacctgccagcccaacagcatccactgtttgccaccataggccaacgtcaagaagcccaaaatcggcaacgataaaaacagcagatacagcacccaatggagaattttcgcccctagcgcctgcaattccggcaaggccggagtgatcggcggcgtcggatgccggtggcgtagcccaaggcggataaacatcagcacaaacaccgacaggccaaagttaaagtgcagatccttcaccaatgccgcgctgtcatccggcacagagtccttcagcaatatggcactgtaagtcaggatcaccatcaccagcgtcagccagtgcaggaggatttgcgatttggcaaaacgaacgctcatagagactcctactaaatacggtattagctgagcatagcggataacaactgaaaagaaccttaagtagaagaaaaatcaggattgtgagtacttaacacgccccnnnnnnnnnnnnnnnnnnnnnnnnnnnnnnnnnnnnnnnnnnnnnnnnnnnnnnnnnnnnnnnnnnnnnnnnnnnnnnnnnnnnnnnnnnnnnnnnnnnnnnnnnnnnnnnnnnnnnnnnnnnnnnnnatgtttgaaattgtagtgacttaccttggatgagannnnnnnnnnnnnnnnnnnnnnnnnnnnnnnnnnnnnnnnnnnnnnnnnnnnnnnnnnnnnnnnnnnnnnnnnnnnnnnnnnnnnnnnnnnnnnnnnnnnnnnntgggtgaggggcatgtttgaaattgtggtgacttacnnnnnnnnnnnnnnnnnnnnnnnnnnnnnnnnnnnnnnnnnnnnnnnnnnnnnnnnnnnnnnnnnnnnnnnnnnnnnnnnnnnnnnnnnnnnnnnnnnnnnnnnnnnnnnnnccctcaagatgaggggttatttggtagcaggggttgccgttttagctggcttgattaacccatcggcacggaacatccccttgatgccgcgcaccgcctggcggatacgatcctggttttcaatcaaggcaaaacgcacatgggtatcgccgtaatcgccaaagccgatccccggcgatacgcacactttagcctccgccaacagacgcttggcgaactccagcgaccccagatgcgcgtaaggctcaggaattttggcccacacatacatcgaggctttcgggttctctaccatccagccggcttcgtgcagccctttcaccagcacgttacggcgctggcgatactgctcggcaatgtccaacacacactgctgatcgccttccaatgcggcaatagcggccacctgcaacggcgtaaaggtgccgtagtcgtggtagcttttaatgcgtgccaatgcgctaaccagctcagggttacccaccataaagccaatccgccagccggccatattatagcttttcgacaaggtgaagaattctaccgcaatgtctttggctcccggcacctgcatgatcgaaggcgctttccagccgtcatagacgatatcggcgtaggccagatcgtggatcaccagcacgtcatactgcttcgccagcgccactacccgctcaaagaaatccagttctacacactgcgccgtcgggttggacgggaagcccaggatcatcatttttggccgcggaatggtttcacgaatggcgcgctccagctcaccaaagaaatccacgccgtccaccagcggcacggaacgcacctgcgcaccggcgatcaccgcgccataaatatggatcgggtaacttggattcggcaccagcaccgtatccccgtgatcgagcgttgccaacatcagatgcgccagcccctctttcgagccgatggtcacaatggcttcgctctcaggatcgatatcgacctgatagcgttcttggtaccagtgcgaaatagctcggcgtaggcgcggaataccgcgtgaggttgaatagccatgcgtatcgtcgcgctgggctacggtgcagagtttctctacgatatgcggcggcgtcgggccgtccgggttacccatgctgaaatcgataatatcttccccgcgacggcgcgcggccatcttcagttcagaggtgatattaaatacataagggggcaggcgttcgatgcgcgtgaaacggcgcgggttgttatcagacatagctacctcgaagagacgttagcgcccggaccatccgagcgacgctggccacagaatggccgaacatcgaacataactcagccttgtcaggctgtcgagccccccgcataacaatttttttaccgtttggcagccgcaaactccgtcgccagcaaccccaaccgccaatcattacaccaccggtccgccaggcggaaattgtcacgcaacgtcccttccagttgaaaaccgcagctctccaacagaccccgtgaggctaaattcccctctgtcaccgtggcatacactttgtgaaacccgcaggcattgaaggcaaagtccaggatcacgggcagcgactctttgccataacctttcccttgcccttccggcaggctgccaaagcccacttcggcctgctggcaaggggaccactcagggcgaaacccggtcattcccaccgcgtgaccgctgtttttttctctcatcaccagacacaaccagcgatcgcaatgcttatcccatgcgggcaagcgtgcttcgaaacgttcacggatctcgtgttccggcagcggatcggcaatgtaacggatcacctggggatcctggaacaaacgtaggaataacggccagtcatctgccgttagtgatgtcagcagcaagcgcggtgtttccaatttcatcaggtaaatctccgaaaaacgaaaaagaggaagttacgaatgaaatatatccctttattttcccctattaaacccagataatcgttaactaggttacaacaaaacagcaactttataacactaccctaccaccaccatcctcgcccaccggcgggccaaggagaacaccatggcttcattacccatcgatgatattcctgccgcaatacaaagcgtcaagcagcagttacgccaggctttacccaactatcgcgaagtcttcctggaactggaagacaatattcgccagcaggtggagcaaatccgtcaggaactggccaacggccaagacccggtgccgcaggtggacgccgaagatatcctgcaacaacgcgttaccgaacaacaaattgccctaattaaacagcgcggcgtgtgcgctattcggggcgtattcccacgcagcaaagccgaggcctggaaccaggagatcggcgattatctggaacgcaataatttcatcgagcggctaaaaaatgccgccgaagataactactttggcaaactggctgccagtaagccacagatctacggcatttactggtcaaagcctcaggtcgaggctcgtcaagatcagcgcatgcatgcggtgcaggtgttccttaacagcctgtgggcaaccgaaagcaacggtaaacagcactttgacccaacacgtgttgctacctatgccgaccgaacccgccgccgcccgccaaactcctcttcgttgggcctttccccgcatgtggatagcggcaccatcgaacgctggctggatgagaatttccgctatgtctatcgtcacgtgttctccggcaactggcagcaatacgatccctttgctgccgatggccgcaccgaagtgcgcgagattgcctcaccggcggtttgttccatgttccgcaccttccagggctggacggcgctgacaccgcaacgcacccacgccggaacgctgaacgtggtaccgatcgccaacgccatggcctatatcctgctgcgtgccctgcaagacgatgtggcggatgacgatctgtgcggagccgcaccaggccgggcgctatctatctcggaacaatggcatccccttttattaggtgggttatcccctattcccgatctggagccgggagatacggtattctggcactgtgacgtgatccattcggtagaaaacgagcataacggcgagttcgacagcaacgtgatgtacatcgccgccgcgccgggttgcgagaagaacgatgcctatctgcaacggcagttgccaagcttcctgtccggcaaaagcccggtggattttgctgcggatgatttcgaagtggatttcattggccgcgccaccgttgacctgctgacgccgctaggcaaggagcaattgggtatcaaatagccctgatgatcgcggtgtgctccggccaccgcggtcattgccacgctgtgatatactgtggtctcccgttcgtcgcagtgagccgccgttgtgcaccctgtttttgaaatgttgttagcggtcttcgatcgtgccgccctgatgttgatctgcctgtttttcctcacccgcacccggctgtttcgccagctgttgcaaaaggaagatcatactccgctggaactggccgcagtcacggccatcttctctctgttcgccctgttcagtacttattctggcatcaacgtcgaaggctctctggttaacgtacgcgtgattgccattatggccggggggatcctgtttggcccctgggtcggcatcattaccggcattatcgccggattgcaccgctatctgatcgatatcgacggtatcacctcggttccctgcctgatcaccagcattattgccgggatcggtgccggttatatcaacctgaaagtgaagaaaggccagcgctggcgtgccgggatcttgggaggcatgctgtgcgaatcactcaccatgctgctgatcgttgcctgggccaaacccaccgaactcgggctggatatcgtgtctaaaattgccctgccgatgatcctcggcacggtgtgtatcggcctgatcgtgctgctggtgcaaagcgtcgaagacgagaaagaggtgattgcggcgcggcaggccaagttggcgctggatatcgcccgtaaaacgctgccctatttccgtaatatcaatagcgaatcgctgaccaccatttgcgaaattatccgccacgatatcaatgccgatgcggtcgccatcaccgatacccaacatgtgctggcctacgttggcgtgggagcagagcactacccactcgggcgcgcagggctgagccgagtcacgctggaaagcatccagcagggcaaaatcatcatcaaaaacaacctcgagaaccagaccgcaccgcagatccattcccaactggtgatccctctatgggaaaagggtgaggtgaccggggcactgaaaatttactactgccatgcccatcagatcaccaatacgctgaaggtgatggcggttggtctgtcgcagattatctccacccagatggaagtctcgcgcattgagcatctgcgccaaatggcggacaaggccgaaatgcgcgcgctacaaagcaaaatcaatccgcatttcctgtttaatgcgcttaacgccatctcgtcgtcgatccggcttaaccaggatactgcccgccagttgatcatcaacctctcacgttacctgcgctataacctggaactgaacgacgaactgatcgatatccgtaaggaactgcatcagatccaggactatatcgccatcgagcaggcgcgcttcggcagtaagctgacggtgatttatgacatcgacgacgatattgccgtgcgcatccccagtctactgatccagccgctggtggaaaatgccatcgtgcacggtattcaaccctgtaaagggaaaggcgtggtggtgatcgcggtgaaagatcggggcgatcgtgtcaggatttcggtgaaagatactggcaacggcatcgatccgatggtaatcgaacgcgtagcgcgcaatgaaatgcctggccacaatatcggcctgctcaacgtacatcaccgggtttcattgctctacggcgaaggattgcgcatccgacggctggagccgggaacggagatcgccttctatgtcaccaaaaatggcaataaactgcagagcgaaaacagcccacaacctgccggggaacagttatgaaagccatcattgtggaagatgagtttctcgcccagcaagagctgacttatctaattaataaacatagtaatatcatcatcgaagccacctttgaagacggccttgacgtgctgaaatacctgcaaacccatcaggtcgatgccattttcctcgatatcaatattccgtcgttagacggcgtattactggcgcagaacatcagcaagtttgcgcatcgtccgtcgatcgtgtttatcaccgcctataaagaacatgcggtggaggcgtttgagatcgaggcgttcgactacatcctcaagccgtatcatgaagcacgtatcatcaccatgctgcaaaagctggaagcattgcatagccgaccggcgcagacgcaagagcctagcgcaccagcaaatcgcaccagccacagcatcaacctgatcaaagacgagcgcatcatcgtcacggatatcaacgacatctactacgctgccgccgatgagaaagtcacgcgggtgtatacccggcgcgaagagtttgtgatgccgatgaatatcaccgagttttaccaacggctgccggaagagtttttcttccgctgccaccggtcgtattgcgtcaatctgtccaagatccgggaaatcgttccatggttcaacaacacctatattctgcggctgagcgatctggattttgaagttccggtcagccgcagcaaggtcaaggcgttccgccaactgatgcgcctgtaattaccagcgtggacctccacgataataacccggtggtggcggaggcggcatccggtgataacgtggcccatcacgccattcacgcggtggcggcccgtagtagatcacccgtggcggcggcccatagtattcacgtgggccataatattcgcgtgggcgatgctggtaccaccagcgtggttcacgccagcgataaccatcccagtaatggccacggtcatcacgatcgccaatatgcaccgacataccgggcacattgatcccgacagaaacatccgcatggctcaccgcaggcagtgacagcggcagcaacgcagccaataacaacagcatttttttcattgggtaactcccagagaacagaacctgtccatttccccatcacagtagttccgcaccggtacgttctctataggacgaaagcccaattacgtctttcagacatatccttcacaattaccacacagtttgccgcgtcggtttagccatctttttgacatatctttgatatagatcacgcccggcaggccgcattccaacggcattttggcccttattcggcaactcatgcagcgataacggcatttcattcctcggcagcggcagttcattcccgatccgccattggcaacgatcgcgccctttataataagcccataccgcagggctctggtggccttgctaattttgccaataggcaacgccattacaggaaggagaccggccatgaacagcaaaccggcaaatcgcagcttaatcgttctcggcaccatcatctgccagatgggcctcggcactatctatacctggagtctgttcaaccagccgttggtagacaagttccactggggccttggcgatgtcgctaccaccttctcgatcaccagcttcttcctggcctttgccacactgttcgccggtaaactgcaagagcgtttcggtattcgtaatctgacgctggtctccggcgtgctggtcggcctggggttgattgccagcgcccacgtgcaatcgctggatatgatttatctgttagcgggcgtggtggtcggttttgcggtgggtatcgcttacatctctacgctgtctaacctgatcaaatggttcccagacaacaaagggctgatttccggtatctccgtcggggcgttcggcagtggcagcctgttgttcaaatacgttaacgccgccctgattagcggtgccggtgtctctgccgccttcttctactggggcgtaatcgtgatggcgctgattgtgctgggctccatgatgctcaaagaaccggtgcaggttaaccaacaggctaaccacggcacgctgggcaacgattacaccgtgcgccagatgctggccagcaaagaggcctacatgctgttcgtgattttcttcgcggcctgcatgagtggcctgtatctgatcggtatcgttaaagacatgggcgtacagctggctgggatggatttggccaccgccgccaacaccgtttccgccgtggcaatcttcaataccgcaggccgcatcattctgggcatcctgtccgataaagtaggccgtatgcgcgtcatcagcttcaccatgctggtcactattctggcgattgccgcactgagcttcgtgacgctgagccatacgttgttctttatctgcgtcggtgcggttgctttctgcttcggtggcaacattaccgtcttcccagcgattgtcggtgacttcttcggtctgaaaaaccacagcaaaaactacggcatcatttatcagggctttggtctgggcgcgctggcagggtcgtttgttgccaaccacttcggcggctttcacgcgacctttatggtgatgggtgtgctgtcggtgatttcactgctgatcaccctgtttatcaaagcgccgaaagcggttgagcaggaagaagagtctcacgcagagccggtattggctaaggccaacggctaatcaccccatagtctttggtcggcaaaaaaaaggggcgcagccaaactggtagcgccccttttttattggctgattacaggtgtatccccagtgtctggcgaagatgggcaccggctcccagcagccccggttgggaatgggtgatcataaagactggaatttcaagtacatagtctttaaagcggcccttgtcttcaaaagcagcgcggaacccggaggccttgaagaactccataaagcgcggcacgatgcccccggcgatatacaccccaccaaacgtccccaggttcaacgccaggttgccgccaaaccgccccataatcacgcaaaacagtgacaaggcacggcgacaatcggtacagctgtccgccagcgcacgctcggtgatatcttttggctccagcttctcgggcagccgcttgtctgccttgacgatggcacggtacagattcaccagcccagggccagacagcacacgctccgctgagacgtgccctacttcgccacgcagtacctcgaggatgatgtcctcttcttcgctgttcggtgcaaaatccacgtggccgccctcacccggcaggctcacccagcggcggttaacgtgcaccagatgcgctacccccaggccagtccccgcaccgtaaacggcaatcggtttatccttttgcgctttgccaccgccaaactgcaacacgtcatcttcggacagcatcggaatagccatcgaaaccgcggtaaaatcgttaatcacttccaggtgctttaagcccaggctttctttcatcgctttgatggagaaggcccaggtgtgattggtcatggcgacccaatcctccgttaccgggcaggcgatggcaatacaggcatcctgaacctccagttgcagctcggccaggtattggcggatcaccgcttccaggctatcgaactccagaccagaataggttttcgcctgggcgatctcgcccgtctcgacagtgcacagcgccaggcgggcattggtgccgccaacatcacctacgagggcataggtcatcggtgtttctccctaaaatgaataatgcgaaattgggtacactgtaaaatcacgccgcccaaacaacaatcgccattctgtggcccgctgcgcaatagcgatctcgatcacaaaaatcgtttcagccagcaccgatttataccggcggttacagattggcgcaaaaaacgtgagatgaaagcgatggcgtgcggctaccattagcgaaatcgctccgttggagctatatactatgcaaaccatttctctggggcctggcgattctgctggctttactctctgttttccctgccaatcagggacgtaacaacaagggatcctgcatgctgcatccgcgcgccaatgctatgttggccttcgccctgcccgcgatcgttatcggttctgtctccagcctgatcctcatcttgctgatggaaagtgccagcatgctgcagagtttactgtggactcgcctcccggaactgctcaatatcgatagccattcaccctggtggaccataggtattctcacgctgaccggtatagccgttgggttgatcatacgtttcgtaccgggccatgccgggcccgatccggcaaccgaatcactgatcggcatgcctttgccgctggtcgccgtaccggggctggcgttggctttgatgatcggcctggcaggcggcgttagtttggggccagaaaacccgatcaccgccatcaatattgccctggtggtcgcactcggggccagactattacccaaagtgccaagaatggattggatcatcctcgccgccgcgggcacgattggcgcaatgtttggtactcctgttgccgccgccctgattttctcgcaaacgctagggggaaataacgaagtccccctgtgggaccggctgtttgccccgctgatggccgccgccgccggggccatcactacccagatattctttaccccgaactttaccctacagcttgatgcttacgaggtgacccggctacgcgatatcttcagcggctcagtggtcgcgctgatcgctattgctctggggatggtggcgatctggtgcttcccacgtatgcaccacatgttccattcgctgaaaaatccggtattgatgctcgggctaggcggtctgttgctggggatccttggggtcattggcggagatatcaccctgttcaaagggttggatgagatgaaactgttggtggtcgacgacagtttcaccaccagccaattgttggtgatcaccctgaccaagctggccgccctggtggtagctgccgccagtggcttccgtggcgggcgtattttcccggcggtatttatcggtgtcgcactggggttgatgttgcatcaacatgttccggcggttccggcagcgatcaccgtttcttgtgccattatggggttggtgctggtagtgactcgcgacggctggctgagcctgtttatggccgtggcggtggtgccagagctgcacctgttaccgatattgtgtattgtgatgttgcccgcctggttagtgctggcgggcaaacctttaatgctggtagtaaaataccagcctccgcatgaagactaggccagagcatactcggcagcggcatgcgcatgaattgccgtggtgtcgaacaccggcaccgcggcatcttgtgcgctaaccaacaggccgatctcggtgcagccaaagataatcccctcggcgccctgctgttccagcttggcaataatccggcgatattcatcgcgtgaggtatcaacgatcttgcccaggcacagctcttcataaatgatgcggtgtacgatatcgcgatcggcagcatccggcgtgaccacttcgatagcaaatttatcctgcaaacgcccacggtaaaaatcctgctccatggtaaagcgcgtaccgagtaagccgatacggcgaatattttgctgccgtacctgcaatgccgtggcatcggcaatatggatcagtggcagaccgctggcctgttccaccgcatccgccaccttatgcatagtgttggtacagatcacgatggcttcggcaccggcagcacgcagcgaagcggcggcccctgccagcaaacggccagcgccttcccaatcaccttggtgttgcaagcgttccacctcatgaaaatccacgctgtagagcacgattttggctgaatgcaggccaccaagccgctgtttcacctgctcgttgatcattcggtaatagggaatggtggattcccaactcatcccgcccaataatcccaacactttcattcggttctccttggttttgactcactatcaaccagacattacccgagaacgacccgactgacgaagcaattatttgctgcgcgaactgctagcctgagcctggcgcggctcgaaccaacgctggcgcagggtatcgtagagccagttatacgccatggtatagggcaggaagaacaggaagaaaccaatctccaacacaaaggcctgccacaacgaaatattgagcataaaggcggctatcggcagaccaatcagcacaaacccggcttcaaaaccaaaggcatggccaatacgcactttgagcgttctgaccactcggctcaccggccacagccgatcaaagatcgagttatagacgatattccacagcatggcgacagtagataacatgatcgccagcgtcccgacctgtgccatagagcggttaagcaaccatgaccccacaggggcacagatcattacagcgatagcttcgaatcccactgcgtgaacgatacgttcagtcaacgacttgttttgcaactgcatacttcacctgctttgtgatcattattgaaaaagtcaggtgattatcatcgcttttttgcgtagattaaaaataggttccatcgataaagtagatacatcatgcgctattccccagaagccctcctggcctttgttgaggccgccgcgttaggctcgttttctgccgccgcacgcaggttgcgcaaaagccaatccaccatcagcaccgccattgccaatctggaggcagatctcgggctgacgctgttctatcgccaagcccgtcaaccagtattgacggaggctggccgcaaggtgctgggccacgtgcaggaaattctcgcggccagcgaacggctcgatgcgctgagcatccgcttgggggacaatatcgaaccacggctgaccatcgttttttccgatacctatcaacccaaccatcacgataacctgctgaaacatttcgagcggcgttatcaggatatcgagctggaatgtatgatcgccgaaggggaggatgtgctggatctgctacagactggccgcgctcacttggggatgctggcggttcaacccacctatccccccgagattgccgtctccaggctgccagagcagactgaaatggggctgtttgttgctcatgaccatccactgacccatctccctgtcctgacacaagcccaccttgccagcagccgccaactttacctcaacacctataccagcaacaacgcggccaaaccgcgcgggcgaacctggtcggcacccagctatctgatgctgttggagatggcggaacaaggggcgggttgggcgatattgccgcactggctggtcaaacagtacgggcagcaacgtctgacagagctgaaaatgcgtggctggccgcaaaccatctcggtcgacgccgtatggtccaagcttaccccgccggggccagcggggctgtggttattggatcgcctgctggaaaatgccaccgatcaggccgccgcattacgcgattgaatggcccgtgaaacgctatctagcagttcgggaaaatccattttcggcagcaccacctcgataaacgccagttgctcgcaaccaccgacctctccaagcgccgcacgcagttgatcaggctcggtgacccgcaggcacttcatcttatgatcgagcgataaagcctgcggtagccgcgtccagttccattgcgcaatatcgttatagcgctgttccggcccatggatggctcgctcgatagtgtaaccgtcattattcagcagcaagatcaccggcttttgcccatcgcgcaacatactccccaactcctgcacggtaagctgagcggctccatcaccaatcagcaatatcactcgacgctgaggctcggcagtctgcgcgccaaacgccgccggtaaggtatagccgatcgatccccataaggactgtacgataaaccggcacccctgcggcagcgtcagcgacgcagcgccaaaacaggcggtaccctgctccgcaatcaggatatctcccggcagcaagaagtcttggatctgctgccagaaaccatgttgatccagaccgctggcactgggacctggtagcgctggccgtttgatcgacggcaacgtccatttgctggccaacgataacgtcagttggtgtaaagccttcaccgcgtcccgcatcgggacctggctgaatacctgctgcccaacccttgcctcgaacggctgaatatctatgcatttatccacgggcaggttatgactaaaaccggcggtgatggcgtcggtgaaacgcaccccgacgttaatcaccacatcggccccctcaatctgctgcctgacttgcggatcgctcgcggctgcggcataggttccggtgaagcaggcatgggtttcatccaacacgcttttgcctaacagtaatgtggaatgaggaatattgacctcattcatccattgttccagcaccggttcggcaccaaagcgttcggccaggaaatccgccagcagggaaaccttctgcgctgcctgcagttttccccgtgcggcggcgataaatgcctgtagggaaacgtcggacagattgggctggcgtaacactaaaggtaccgggcgcgaagccaacggagcttcagcaacgtcacttggcaacagcaggtacaccgggcggcgctcgtaaagtgcggtggtcaacaggcgatcgatttccgcttccgcattgctggccgtcaggctggcctgggcgatggtgacctctttcgccatgcgggcaaaatgaccaaaatccccatcccccaacgaatggtgcaacaaatccccggcacgctgggctcgcaaagccggggcgccaacaatgtggatcaccggcaggtattcggcatagctaccggcaatgccgtttatcgcacttaattcacccacgccaaaggtggtcagcagtgccgcggcaggcttgcagcgggcataaccatcggcagcataggcggcgtttagctcgttggcgcagccgacccaggttatctgctgatgatcaataacgtgatcgagaaactgcaggttgtaatctcccggtacgccgaaaaagtggcgaatgccaatctgggctaaccgatcgagaaggtaatctgccaccgtatagctcttgctcatgatcatcacctaggtaacgggagaatggttagtattaagtattaaagatgctgccgaattttcgaactttatcggcaagaggcactggaaacctcactttacatctacgcactaacggtatgcagtagagatcatccataagcaatttgaataaatggcggacaattagcgtgatctggcactctgacaacccagatgtaagcgcatacactgaatatcatttcccgccgtcgatgaggattttatggtttatcaagctgagcctgcccgctaccagaatatggaatatcgccgctgtggccgcagcgggctgcaactgccagccgtttcgctcggtatgtggcacaactttggtgatagctcgctgtatgacaatgcgcgcagtctggtacatcgtgccttcgatcttggcattacccacttcgatctggccaataactacgggccaccgccgggttctgccgaggagaatttcggccgcattttgcatcaggatctccagccttatcgcgatgagctgattatctcttccaaggcgggctacaccatgtggcctggcccctacggtgactggggatcgaagaaatacctggtcgccagcctgaaccagagcctgcaacgcatgcggctcgactatgtggatatcttctaccatcaccgccctgacccagatacgccgctggaagaaaccatggcggcgctggatttgatagtccgccaagggaaagcgctgtatgtcgggttatcgaattacccggccgaacgggcgcggcaggcatttgccatactgcaacagcttggtactccttgcgtgatccaccagccgaagtactcgatgtttgaacgctgggtcgaacccgagttgctggatacgctggaagagcatggcgtggggtctatcgccttctcaccattggccggaggcatgctgaccgatcgctatctgcaaggcattccgcctgattcacgcgcagcgagcggcagccgatcgctcactcccgagcagattaccgaagcgaaactgcaaaaggttcgccaactgaacgcgctggcagaacagcgtggccaaaagctttcgcagatggcgctggcctgggtattgcgcaacgatcgggtcacttccgttttgatcggtgctagcaaagtcagccagattgaagatgcggtcggtatgttggccaaccgtaagttcagcgcagaagaaatcgccaagattgagcagatactgatgtaatcgcttacaaaccgccggtgaattatcggcggttttttcaccttcctcctcagataactcccaatccccggtattccccatggctttcagaatttccccaaaggcgcagccgctccacggcgatagcatccctcggataaatacctcatggattttacgcatagcgttgaagaacgagggataacaaccgttttgcatggccaaaacctataccgatgaacgtgcttcattatcggtacccggccaagggagcctaaatgttcaaacctctgtttaccgctgccattctggtggcgcttttcatgcccatcgcccatgctagcagcgtcaatattgatttgctgccgggggtctcactgcagattggtgaccaggacaaacggggcaattactgggacggttacgactggcgcgatcgcgattggtggcatggccatcaggggcgtgatttaggggagcgcagccgccggggctactattgggatggctatcgctggcgtgaccgcgattactggcagaaaaattattactatcatgatggccgctaccgcaaggccgataaatactattacaaaaagtataaaaaacaacatcataagaacaaacatcatcacgaaaaacaccatcacgatcatgatgattgacccctcaccccaaccctctcctacagggagagggagccgatcggcatcgtcatcaggtacagaagtcaacctgtatcacgtttatcccttctccataagtgagggtcggatgagaggaactatcctaaagcaggttgctgatcagcagataaccgtttagcccaaccaccaccaacacaatcagtttaccgagattctgaatcagacgaccgttgaccatatcccccatcagttcacggttgccggtaaacgccagcagcggcaccaacgccagggcaataccaaagctcagcagtacctggctcaaaaccagaatacgcgtcgcatccatccccatcataatgacaataaacgatggcatcatggtgaccacccgccgtacccagataggaatatagaagcggacaaagccctgcatcaccacctgccctgccaaagtacctactacggtagaagagagacctgctgcaaccaggctcaggccaaaaatggtggccgccgcattgccgagcaggggctgcaacgtcaggtaggcttggtcaagatcggtaatgccgctgtggccgttgaaatggaatgcggcagcggcggtggccatcatcgccaggttaacaaaaccggcaatggtcatggcgatcgccacgtccagcttggtggccgaataacgttctgctttagagtctttaccggcggtctgcgtcagcgaggagtgccaataaatcacatgcggcatgatggttgcccctagcacccccgcagcaagaaacaccgcgtcaccgtttggcaaatccgggatcgccatccctctaagtaacccgctcagttgcggctgagaaaataccagttctactatataggccatcgccacaaacagcagcaggccgccaatcaccagttccagtggcttttgcccgcgtttttgcagcatcaggatcaggaaggtggcaataccggtgaggactgcgccctgcaacagcgttacccctagcagcagtttgaaaccgatcgcggcaccgataaactcggccaagtcagtagccatcgcgataatctccgcctgcacccaataggcccagacggcagggcgcgggaagcgatcgcggatatgttcggcaaggtttttaccggtagcaataccgagtttggcagacagcaattggatcagcatcgccatgacgttggcccataccaccacccacagcagcgtgtagccaaaagaagcgccagcttgaatattagtggcaaaattaccggggtcgatatagccgatggcggcgataaaggcaggccccatcagagaaagtttgatctttctggacgggcggctggaggaagtattgttaaccgcgcgactgttcagcatagcgaaaacccttactaatttagctcaccttcatctttacttaaatgataatgattatcaagtgcatttacagcgataatggttatctctgcgatagccaaaaacgaaggttttatcgaacagatcgcatgaaatcctggcgtttccatctactctggatcacaaggttcagagcggatcacgcttgataataaaagtagcacaaaaatgccacgaacacgcatatttattaacatcttgatctttggtgctttgtcgtcatagattaggactatctccactatgattttccatatttgctatgaatgtctcgtttttaaacttggcgttacataaaatgacaaccgaaattcagcctgcctcaaatttggagcaaacatgtcccatattgcgcactttgcgttagcgttagtggtggttgcgatcctggccctgttagtgtgccgcgatcgtaaaaacatccgcatccgctatgttattcagttgttggttattgaagtattactggcctatttcttcctgaactcggaagcaggtttaggctttgtaaaaggctttgcagcaatgttcgacaagttgctcgggtttgcggggcaagggactgattttgtgttcggcgggatgggtgacaaaggcctggccttcttcttcctgaaggtgctgtgcccaatcgtgttcatctctgccctgatcggtattctgcaatacatcaaagtactgccgtttatcatccgcatcatcgggaccgtgctgtctaaagtgaacggtatgggcaaactggaatccttcaacgccgtcagttcgttgatcctgggccagtctgagaacttcattgcctacaaagatgtgctgggcaagatgtcagaaaaacgcatgtacaccatggccgctaccgcgatgtcgacagtttccatgtctatcgttggtgcgtacatgaccatgctggatgccaagtatgtggtggcagcgctggtactgaacatgttcagcacctttatcgtcctctcactggtcaacccttatgacaccagtaaagaagaagagctgcacctcggcaatctgcacgaaggccaaagcttctttgaaatgctgggtgaatacattctggcaggcttcaaggtggcgattatcgttgccgcgatgctgattggctttatcgccctgattgccgcgcttaacggcctgttcagcgccatcttcggcctgagcttccaggaaatcctgggctacttcttctatccatttgcctgggtccttggcgtgcctaagcacgaagcgttgcaggttggcagcatcatggccaccaagctggtttccaacgaattcgtcgccatgatggaactgcagaaaatcggtgctgagctgtccccacgcagcatgggcatcctgtccgtgttcctggtgtccttcgccaacttctcttctatcggtatcgtagccggtgcgattaaagggttgaacgagcatcagggcaacgtggtttcacgcttcggcctgaagctggtttacggctcaactctggttagcctgctgtcagcggccatcacaggcctggttctgggctaacagctttagaatcgacaagttctagtcttaagacgcccgatgaagtttatcgggcgttttttatttgatggcccaatgacaatactgctcgaactgaggggcggaatagacacaacatgcggcggtgttcttacagcacaaaagcaaaaagccgacccaagggtcggcttttcaaatggtggtggagctagacgggatcgaa

SEQ ID NO: 204 - DNA, 46302 bp, unknown
  Altogen  635822 strain
  misc_feature (21011)..(21011): n is a, c, g, or t
agggagaggggaccgatcgagtagatctgaaagctcggtaacgcaccttggataaggggaccgatcgaatttcctctttacttccaagttaaagatcaactcccgccccgaccacaactccgcgcgggctccctctccctgtgggagagggtcggggtgaggggagaaagcgatcgcaaaatcaacaaatccactcctgcaaacgtgggtatttctgttgagataacgaccagaacacttattatgtaaactcggcactcaataagggaatacgatgagaagacttccggtctatctgttacttgatacttcgggctccatgacgggcgaacccattgaagcggtcaaaaatggggtgcaaacgctgctctccaccctgcgacaagatccctacgcccttgaaaccgcctatgtttccgtgatcaccttcgattcttccgcacgccaagcagtgcccctcaccgatctgctgagcttcaagctgccagaactggtggccagcggcaccaccgcgctgggtgaggccctctcactggtcgccaccagcatcagcaacgaagtgcagaaaaccaccgccgagaccaaaggcgattggcgcccgctggtgttcatcatgaccgatggctcgccaacggatgactggcgcaaaggcgtcagcgactttaaagccgccagaaccggcgtggtcgttgcctgtgccgctggccacagtgccgaaaccaaagtactacaagaaatcaccgagatcgtactccagctggatacggcggactccacctcgatcaaagccttctttaaatgggtgtcggccagcatttccgtcggcagccagaaagtcgagtcaggtaaaaaggaagttattggcctggacgatttaccgccaccaccacccgaagttaacgttgttctataaaacattttcaaggagattttatgtcagtcagtttgcgtaaaggacaaagcgtcagcctgcgtaaaaacgaacacgacctttcctcagtcaccatcgggctcggctgggatatcaatgaagagaagaaaggtttgctgggtggtctgtttggcaagaaagagccggagtatgatctcgacgtcatcgccttcctgtgtgatgcccaaggcaaagtcgccgatctgggcgatgtggagaacggccggccttcgctggttaacggggacatcattttcttcaacagcctgcgccataagtctggcaacatctggctgaccggcgataaccgtaccggcgcgggcgatggtgatgacgagcagattatcgcccagttgaactccctcgatcccaagtacgaaaaaatcgttttcatcgtgcagatttataacggccaggagctgaaacagcacttcggcaaggtgcaaaatgcctttatccgtgcggtggatgccaaaaacgtggaaatggcgcgtttcgatctttcaggcggggccgcctttgatggccagcgttccatgctgtttgccgagctggtgcgtgaaagcacaggctggaagctgaacgccattggcgaaccttccgaatccgactccttcgtgtcccatttgaagaactacctgcaatgagaagattacccgtttacctgttgattgatacctccgggtcgatgcgcggggaatctatccatgccgttaacgtgggcattcaatcaatgatgagcgcgctgcgccaggatccgtatgcgctggaaagcgtgcatatctccatcatcacctttgataacgaagcccgggagtttatcccgctaacctcattggaagagttccagttcagcgacattgtcgtccccagcgcgggtggcaccttcaccggggccgcgcttgagtgcctgatcaaatgtgtcgatcgggatatccaccgctccgatggcgaccagaaaggcgactggcggccactggtattcctgatgaccgatggcaccccgtcagacagctatgcctatggcgaggcgatcaaagaagtcaaaaaacgttccttcggctccattatcgcctgtgcggtcgggccgaaggccaaacatgaacacctcaagcaactgacctctcaggttgtggctctcgaaactctggattcaacggcattttccggcttcttcaaatgggtgtcggccagcgtcgcgtcaggcagttccagtgcgggtgttaacgccgggcaggataacctcccgccaccaccaccggaaatacagctggttctgtagccaacaggcaaagcttgagactgcggtcactggactcacaacgtaggggcgctgcatgctgcgcccgtttggataatcaatgagttagcaatggtcacacagcgcggctcctacaaattcagcaacgttgccagtttgtcatcaatctgagacaaagcctctacccggagctttgcctgttttttcattgccccatgacgcgcattgcaagacgcatccgcctgacgaggtttttaaccatgagaagactgcccatcttcctggtcttggactgctcagagtccatgatcggggaaagcctgaagaaaatgaatgatggcctgcaaaggatcgtcagcgacctgaaaaaggatccccacgcgcttgagaccgcctggatatcggtgatcgccttcgccggggtggcaaaaaccatcgtaccgctggtggaagtggtgtcattttatccccctcgcctgccgatcggcggcggtacccacctgggcgcggcattgcgggaactcacccgtcagttggatcaacaggtcagaaaaaccacccaggaacgcaaaggcgactggaaaccggtggtgtacttactcaccgatggccgcccaacggacgataccgcccccgaaatcaggcgctggaaagaaaactacgccaataaggtcaacctgatcgccatcggccttggcccttcggcggatatgaacatcctgcggcaactgaccgacaacgtcctactgttcaccgacagtcaggaaggggatttcgcccagttcattaagtggatcaccgcgtctgtctctgcgcacagccgcagcgtgggggaagatgcacctccgctgctcacccacaccgaccacattgtgcggctggccaaagacgatattgccagagcctacgacgaaaactgcgtcaccctgacgggccgttgcagcaaatcacgccgcccttatctgatgaaatacgaacgcccggccatcaacctctcctcgctggatttcaagctcaatatcaacggcttcaacctcaacggctgcttcccgatcgatgaggattattttgcctggagcgatgaatcggcatccgccattcaggtcaataccagtgaactgcacggcgtgccgggttgcccgtactgcggcaatgccagcgcctttgcaatgtgtacctgcggcaagctgttgtgcgtcaacgggcccgatgacgttatctgcccgtggtgcgataaggggctgacgttcagggaaaacggcggcgactctgatttcgacgtgacgcgagggaaaggctgatgcaagacgtggagaaactgcgccagaacgtactcatgctgatcctggcagaaacgggcgcaacaacggatgacgcccagcttgccagcctgcaagccgatgatgagatcggcaccttgctgaccaacctcatcacgaaagtgacagccaagacccccgtagcggttgagacaacagaagcttcgccgttggttgccaatgacgataccttggccgacgaacctaaagtggtcctcaccaagagcgatgacatccctgttgtcgccccagatatcgcaggtctgccaacaccagacgactggcagaaagcaccgtttgagccactggaagtgcaaggagatgccacattgcctgaagaaagcgccaaagaaaacctgaagccaggccagatcccgtccggcaccgctaccccgattagcacaccgcagaacaatcagccgcaggcaaaaatcaacgtggctaatgcccgtaccggcgtccccttccactctgaaatcgatatcgtgctggatgatggaacgaccgccgaagtgctggccgtcgcgttctctaaagatatcggcatcacctttgatccggcgacctcttcactggcaggaaccgccaccgaaagcggcgactttgacatcacggttacctggtcttgccctgctgcgccgcaatgcaccacccaagttccctttatcgttaaccccgacccgcgcagcctgtggaaaatcctcgagccgcctgccgattcgcgctatttcaaaccgcacgtcgcccatcagcagatcctggagcctggcgtaaacatcgtggcggccagccgcagagggcgttcacatgaacatgcgggcaccttccgggacgatgacttctacatcgccagcaatagcgataacggctggaacatcatgttggtggcagacggagccggtagcgctaaaaactcgcgcgagggctcgcgcatcgcgactcaaaccgtgggcgactacctgactaccctgttgaatagcgacaaagggctggaactcaaagcctgcgttgaaaactggggaactgacgatcaacggatagtctgggaagcgtttaatcgcctgttccgccaggccgcgatcatggccgtcaacaatatcagcaatgaatccatccgggccgaagagagcgccaaatcctattcgaccacgctgctggtcaccgtttccttccgtaccggggccgagctgttcgccgcctcattctggttgggcgacggtgccattgcggcctacgggccggtgggcaaagtgcgcgtactgggcacgccagacagcggtgagtatgcgggccaaacgcgtttcctggatgccgatgccgtgaacgatgcgaacttcagtaagcgcatcagcatcggtaaatggactgaggtctctcatctggtgctgatgacagacggcgtctccgatccccgctttgaaacggataatggcctgcaaaatagccagaagtgggatgacctgatcgcggagctgacgccctgcctgagcgatccctcgcagcccgcagagcggctggccgaatggctgaacttcttctccccgggcaatcacgacgatcggacccttatcgtggcgtggtgaatggattggactacatagcgggtgagtaaaatggcaaatattgttacctgtaccaccagggatggcgaaaccatccagtatgtcgatgagatcatcggctccggctccatgaaggacgtctacttttcaccggataagtcatacgtagtggcgttctataaaaagccgcagaacgagcaggcgaaagaacgcattgagatgatcactggccgctaccggcagaacatctttgagcaagccggcggggattactggcaagggctgttttgttggcccaccagcatagtggaacacgacggcaagatcggcatcgtggtgcccacctaccagagccacttcttcttcaagtacggctcaaagaataatgacttcctggggattaaaggccgcgagaaggaaggtaaatggtttgccagcgccaataaccagaacaaattcctggatccgcgcgaacgtggcaacaccctgaattacctgaaggtctgcttgctgctgacccgggcagtccggcgtatgcacgccgctggcctgtgccatagcgatctgagctataaaaacgtgctgatcgaccctgagcagggccacgcctgtatcatcgacgtcgacgggctggtggtgccaggtaaatacccaccggacgtggtcggcacgccggactttattgccccggaagtggtgaaaaccagccatctgccgaaagaagatccgcagcgcatactgccaagcatcgccaccgacaggcatgcattatccgtgctgatctacatgtacctgttcttccgccacccactgcgcggcggcaagatccatgacatggacgacgagatgcgcgatgaatcgctggccatgggtgaaaaggcgctgtttattgaacacccgaccgatcacagcaatgcggtcaaactcaaccaggtcagcccttcttcgctgccttgggccgatccgcagaaagtgccctacaccattatgggcccctacctgacgccgctgtttgaaagggcgtttattgaaggcctgcacgaacccaccaggcggccaaccgccgatgagtgggaaacggcgctggtgaaaacggtcgatctgatccagccgtgtcaaaacgctgcctgcgaacagaaatggtatgtgttctccggtaaaaaccgcccggcctgtccgtattgcggcacaccgttcaagggtaagctgccgatcctgaacctttattcctcgcgtaaagccgggagcttccgccccgacgatcatcgcctgatggtatggagcggccagtcgatttatgcctggcacgttaaccgcctgatcgcccccaacgaacgtacgccagacgcgcagaaaaaacgcgtgggctatttcgtgttccataacgatcagtggtggctggtgaatgaaggcatcagcgggctgctctccttgccggataagaccccggtggcgatcggtgacaagctggcgctgaacgatggggttcagttcgtgctctccaccgaggagggcggcaggctggtagtggtgcagttggtggaaaactaacggcagatgtcagtgatttgataagtgcggagtgtagcattacaggtaatgcacacctcgcactgcaataatagctatcccttaacgacggctaaaggcgctggctcccatagaagtgagggtttgccccagaaaagaaaggttaagctggcgtccatcgcatcactacactcccatagagacagtaatatcctagatcaggttcagcactagcacacctgaccactggtacacaccgccggtggcaatcccacggtcaattagaacactcgataaggtgaacgaccgactggctgccggcttcgccacgaaacctaccccattgacggcaacataggtctcgtcaatgtacatgcgggatagaagatcggggtggatcctaccatcaccattttgggcctcccccatcagggatagagtgtacccagacccggcggtcccggaacagactacgttaatcgtactctctgcacgctggccgttgagtttgccgacgttaatcgggccatggtcaatcaaaatctggttcgcgaccgtgcatgaccccccaggggctataccgtcgacccatgtgcagtaagccgccggattaacctctacgtccttccgccctcggcctatacagatttgttttttgtagccagtcggattcgaactggtaagctggggccgatctctgtttagccaagcggttatagcctcaggagtttcagacctaccagtgtaccaatagaagttgccaaccctgctggcattcccagagcacggattggggaaagattgcctgtagcacccgtatacgacgatctgtccagacccataaggagcttggtcagtgaacccccctaacaattggatggtggatgctgtagtaccagtgccattgtcaacgtcatcggaggtactattgagaacggtgaagcccagaccaagggggcaatacaaggcacaaaccaagggtagtgaaaccaagaacaatctcatcatgtttcttactttatcctatccagcgctaattggatgtaaaggttgattatcaaattttcatctagtgcaatatcctggcacgcactaaccacatctcttcggctgcatataccgtcgtttgcggtgatctcaacgcaaggggaatactaatcgacgacaactgaagactacattttcctgtacctttggcagcaccaaggagatgtggaaacctacgaacatgtctatgcccgaaaatataccccaaaaaacccaaaagcagaacataacaccaaataatattaattattatttctttactctaaaaaacaaacaaaaacacaacaaaaacctgataaggggatattaatagagttaattcgctttttaatttttaatcaaaaacaggtatgcaactaataccttgtttattagacagacggttgctgcctgggaagagggaagcctagccctttagggctgggagcattcagagtagcatcatccctctcccactgtgctcctcgatatgtccgggctgccttgccacagccaatggtacagatcgtgactgcgctggaatcccaattttcgcatggatgcctgcttatgggcgctgacggtcttggtgctgatctgcaactttctggcgatctgtgtaggcgataagcctgctgctatcgcctgcaagacttctcgttctcgccgggtgatcttttcgtagtcaggtacgcagggggcattattattgagctgcacgtcgaacagcctatccagcagttgcatcaccgcctcgggtttatcattcaggccgatttctccctgttgataggtgaccccttctgtatttttgttccgtattaggaagatttggtagcgttgatacccttctcccctccagctggcattgctgctgacaatcagatccgcaactttcagatgaataatatcattgcaatctgcatgaacaaatagaggggatactcccctgagataaaaataccgttcaaaaaggtggcgaataccttgtaagaaatagagatttttgccccaaagagcaataacgatgcgtgagttcatattgacaccttaactgcctgattctttttaaatgacaccgttgatgatgtgatacatcattgggatatatccccaccccgggtaggtgttgcaatacaccagcgtaaactcttttggtctggcaccgatgagacatgcgccttctttttctttaccagtttcatcaggtagtagcgggacacataaatgttggtatcacagtaatcggcaatatcccgggtcttgggccatttatctctaggtggcaatgtatcgggagggcagcaatcaacacggctcaacacctgcaacgccgtcagaaccttgtcgaaggctgcattatgtttcttatatttcattaggttaaaccttttctcttacgagcgttcgtgatgaataagcccgtgttacaggccaaagcccactgatcaaagcggcaaacggcatgcaggtgctgtttgcttggctttctgagtgtatttaataccacatcggatgaaagcattcataaacggtacaataacgagttttaaatctggctaaattaaatttgcgatataatataccggaaacataatgatacatacgataataactcgcaatttagccataaaaaccacctgccaaggcaattattgcaaaatctctttattcatcaaaaaaaacttttaaaaaataaggttggccgtaataatcccggcttcaatgagcgaccaggaagtatcctaaacatatatcattaccactgagagattaatcttaatgaaaaatcaaaatgaaaggttttgttttcgatttagataattatagagtgcggaaaaccctccatttccagctcagccaaactgtgtattccatgatggaaagacagcagcacaacaagtctttcatgcttgatggatagccaacctctctcaatctattagggcatagtcttggcttaaaaaacgcatggaaatagcatcaggatgctttgctcacttcttaaaaaactgacggtatcagtagtgatgatcttattgaaggtgctttgtctgctcggactgttcagataaatgatggctcgtggctaataatccgctacgaaatgattttattcacttttttaatacgtaaataaggaattcattatgcgtaagtctatttttactctggccccggttgttgcagctctgttggcaggatctggcgtggctcaggccgcatctaacgcccagatgaccattaccgccaacgttgtcgcagcgacctgtgacgtttctctctccaacgctagcctggacctgggtaactattccaaaaccgcaatcaccgcagtcgccaccccggtgacccagagtataaaaaccttcaccgtgggcctgagcaactgtgaaaccccggcagcagcaaacgatcaggcaagcctgatcgtcaccggccagacactagggggcaacccgaacatctttaacagcaccggcaccaataccggcatcatgttaagtgaagtgacctcaccaaccacctacattaccgccggccagaaattatcggtagccaaagcaggtgagaccccggaagcgggcgatttcaacgcgaaatccttgagcctgcaggctggtttggcctctacgtccctcacgccagatatcggtatggttagcgccccaatcctgttcagctttgcctacaactgatgtgttccagcgggccgatggcccgccttttcaggatccgcaatatgacgcgctttatctccctgttttcgctgctagtggccctgctgggtgcgccgttggcaggctggtccgctggctttggcattaatgccacccgcctgatttatcctgaaggggccagcagtatcaacgtcgcggtacgcaacacccttaaccacgaaccgtacctggtacaaacggctatcagcggtaaacaggatgcacagaccgcggccccgttcaccgtgacgccgccgctgttccgtctggaacctcaaagcaccaatcagttacgtatcgcctttaccggccagccgctacctgacgatcgggagtcggtgttttatttgcatgccaccgcgatcccggccagtacgcaaagggatccggctcaacaacgtaatgacgtgcaggcccagttgcgtttcggcgtgggcaacattatcaagctgttctaccggcctgcgagcctgagcggttcctctgccgccgcccaaaaagagttgcagttctcccgcgtggctggcgggctgaaggtgaccaatccctctccctattttgtcagcctggccgacttgaaggtgggggggcaacaactggccttggacacgccggctgcactcatgctcccccctttcggcaaccatatctggccggttaaaacaccgttggcaaccggcaagcgggtgcagtggcagaccattaatgataccggaggcaccgatgcgttcagcgcaacgttaccttaaggccgcgctggctgtagtgctggcaggtggtggagcggtatccgccccggtgcaggccgtaacgctggatttctccgccgtgctgaccaatggcacctgcacgctcagcctggataaaagcacactgcctttgggtgtcatcgctaaatcccagctgcgcccaaaccagctggttgctccacagccctttaccctgtccgtgcaggactgcaccggttctgcgggcggcagcctcaagcctgtagtgactatcgccggcaccggcaccacccaagacagcaaatggctgtttcgcaatgccggatcggcggcgaataccgggatcttggtcatccagagtgcctctgtgccggactacagccagcccgaagtcaaaaacaacagcgtgctttcactggcgaaccccggacagataccggtcaaccagacgttcaccttttatgccggtgccagttgtggcggcagcaccgggtgtgccacggtcgcgaccggtgacgtgacggccacgctgatgtttacgtttctctatcagtgagggcccgatgacacagcgatttcatcaggtgctagcaagcctgttgctcactttgagcctgtctgcacaggccgggagcggcggcatcagcctggggcagacacgcgttattttttcttcagcggataaagcgcaacccctcaccgtcagcaatagcggacaacaggcttatctggtccaggcccgagtgcaaaacggcctggacgatacgacccccgcgccgtttatcgttacgccaccgctgttctcgctgcaaggcgatagccgccaactgctacggctattgccgcagggcgccacgctgcccaccgaccaggaatccctgttttatctctctatctcggccattcctgcacaggctgagcccgtaacggcggccgatcggctgtcggtaggggtacgtttcgtgatcaagctgttttatcgcccgcaagggttggcgttacccgcggacaacaccccttgccgactgacgttcaagcgtgaagcgcacggcgtacgggccatcaatcccaccggctattttcagactctggggatgctggccgttgacggacataccgtggctctagaccaacaaccggcgatggtgcctccgcacagcagtatcaccctggccgttgacgggccggtgaataaggtggcctggcagacactcaccgaccatggcgggctctccaagtcctgccagcagacaagctcagcctccacggagactacaccatgaagtacccgatttatcttctgatgggcctatgcctgttggtcaacaaaatgggcctggcacaggctcaggacaacgcctcgccggggatatccttttacgtgctgcgggtgatttacccggagggcgaaaagcagggtgtaacgttgaccgcctacaacaaaagcccggcaccgtacctgatgcagtcatggatccgcccggtcgatccggccaccggggacgtcgatctgagctggcatggcaccccggtgatgccgtttattgtcacgccgccgctggctcgcctggaagcgaatggtgaattggcgctgcgtatccggcgcaacgatatgccgctgcctaacgaccgcgaatcggtgttttttatctccatgaaggcgctgcccacccagcaacccgacggtgagcagatggtgatgacggtcgtgagcaatatcaaactgttttaccgcccggcgggtttggtgaaacgcgccgtggcagacatggccccgaagctgaccttccgccgggcaggcgaccaattgacagcaaccaacccaaccccctactggctcaccttctcccgcctggcggtggggaatgtggcgttggacaaaccggctctgcgcctgatggtaccgcctttcggcaagcagtcttacaccctgcccgccaccgcgagcgggaaagtcagctggcagctgattgatgaagatggctgggataccccggttgcccaacaggattgacgatttctcccttcctggcgcgttacggggagccacgttctttcagacggataggataaccatgaaaattcaccctcttgcccttgctctttccccactcctggtgggcagcgcattgattgcaggcacgtctccagcctggggccgcgactactttgacccggcgctgttgtcgctgggtggtggcctggaagccgtcaccgacctgagtgcgtttgaaagcgccggacagacccctccgggaacgtatctggtgacggtgctggtcaaccgtagcgagcgtggccaataccgcgtcgtgttcaccccgggtgacaagggccaggtcagcccggaattgactccggcctttctggcggagatggggatcaatacccccgcattgcccgcttttggcgggttgccggtcgacaagccagtcagtgacctggccaccctgatccctgatgcccgagtgcactttgattttcagcagcagcgcctggaactcagcattccccaggtagcgatgaagccggacgccagcagcgtggttaaccctgcgctatgggaccagggcatgagcgcttttttactcaactataccctcaacggcgggcgcagccgccaagacggacaatcgggccaatccaccagcgaacagtccaacttgttcctggggctgcacagcggattgaactggcaggcctggcgcctgcgcagtgacatgacctacacctacaataacagccgcactggctatggcgacacgcaacgcaaccagcaaacccgtttctcaaatacctatctgcaacgcgatatccaggcctggcgttcggatgtgctggctggggagaacaacaccggcaatgacgttttcgacagtattccgtttcgcggagtgaaattgagctccagcgaagacatgctgccgctcagcctgcggggatttgccccggtgatcagcggcattgcgcagagcaacgcacgggttaccgtcagccagaacggtaacgtggtgtaccaggcgtatgtcgccccggggccgtttcggattaatgacctgtaccagaccggacaagggggagacctgacggtcacggtaaccgaagcggatggcagcgtacgtacctggacccaggccttctctgctctgccggtaatgcaacgcccaggtgggttgaagtatgaactgaccgccgggcgctacaacggcggcatcaccaccggctccagagaggcccattttgcgttgggcaccctgatttacgggctgccccatgacatcacgttgtacggcggcgggctgatagcggagaaatacgcctcggcggtggcgggcagcgggatttcgctgggggatttcggcgccatgtcggcagacgtgaccctctcatcggcccgcatgtatgacgaaagacagagcggccagtcataccgggtacgttatgccaaaagcctgctcagcacgggcacctcggtggatctgacggcttatcgttactccacccggcactattacaactttgccgacttcaacaacagcggttatcagctcagtgaaggccaggtgccctgggcactggcccgacagcgttcggatttccaggtgcgggtaactcagcaactgggggattttggatcgctgtacctgtcgggtgcgcgcagtgattactggggcgatgagcaggtgaacaacaccctgtcggcgggttacaccggcagttgggacggcgtgagctatggcctggcctacagcgttgaccggataaaatccgacggggattggccgcagaaccgccagttggcgttcaatatgcaggtaccgttcagcatgttcagcgcgcagcctgccctcaatcgcagctacgccagctaccagatgacgcacgacagtgaaggccgtgtgcggcaacaggtgggggtgagcggctcggcggcggaagaccgcctttcctacagcctgatgcaggggtggagtaacaacaaccagagtggcaacgggggtagcaccagcaacctgaatctgggttggcaggggagccagggcatggtcagcgccgggtacagccacagcagccgctataactcgctgaatgtgagtggtaacggggggctggtagtccaccccaacggggtgacgctgagccagcaactgggcacttcagtagccgtggttcgcgcaccgggcgctgccggggtgagcgtaatgaacggcggagtccgtaccgacagccgcgggtatgcggtggtgccgtacctgtcgccttaccagaacaacacggtgagcctgaacccgtcgacgctgccggaagatgtcgacctgccgcagagcagtaccaatgtctaccccaccaaaggggcggtggtagcggccacgtttacgcctcgcaccggctatcaggcgctgataaccctgacccaggctggcataccggcacccttcggcacgctggtgacactggacggagaaggagcggagatcaacagcggcatcgtgggtgatgccggccaggtgtacctgagcgggttgccggaacagggaaaattgcgcgcggcgtggggccgtgaggctgcacagcagtgcctggcccacttcaacctgagcaaggcagcagtatcagcaaacaatccggtgcgcatgctgaatgtgcaatgtgaggaaggacagtgatgaaacagcgtttaataaagacagcatcatgcggtatcgccagcatcgccttaatgatgccccttgctgcccccgttctggcggaaaccatcaccatcggcaagggtgcggggatcctatgggagggcatgccgtttaacgcgacattaagtggccctctcgatcatccacaactgaatcccatatacggactcttgtcagtctctagatcatcgacccggtgtatggcttcaaatgaattgaaaaacattggtggctatttggccttcccactgaccggggtacctggagtcggattgatgcctcgggcctcgggtagcgccacttataccctaagtaacaattctcaggggaagttgactggcaccattggccagccggaaaccagaggctcctcaacgtcacaagggaatattacctcgccaccaaactatacatggtgcctgccccctgccatgtcgataaatacggcattttactcgagttcgggctctcgtacggcaacgctctcaggttcctgggtactggtggcggacggtacccaacgagctggtgagggctcgattccaccgatgtattttggcagcttttctaccactccctcgggggatagaaccgtctctatactgcccaccaatatttccctgcgcatctctacgctggaatgtagcgtgaataccccgacagccatcaacttcggatcggtcattcgcaatacccaggccaatgcggaactggcggtgaagcccgtgcaactggttgccacctgcgggcagcctactgaccagataaatgccaatatcaatctgcagttccgcgccatcagcggcctgtacaacagtgcaccctcacggctggcattaaaccaggggggaggctatatcaccggggaaattgataacggggtgacaggcagtggcgactgtaaggcaacaaccggcttacgctttgataactccctcataaaactgggcagtatcaccaatgcggaaagcagcaaaaccttgaccaatcagctcacctggcgactgtgctcgggaggcagtaacgtgccattcggtgcagtcacggcctctacggaaatgctggtgacgtttaactgagccgcatttggcgctgctgacggttgggtagttttccagccgtccagcgtattgaagctgacgtctacctaccctgcaccaccgctcaatcctctgtgcagatcatcagcgtttgattgggcaaagaaaggatatagtcccaggtattcactctgctgattttcaatttgatgacgtcgtattttaacaccttgaaaatattgataagttcaggattcctttctcccatatggatagcgtaataacccgcctcttttttgtaactaaaatccacgataccgtccgccaactttggcgatgcatttgggcaggcataggtgccggatatcaacaaatacccctctccattaccgtgcatagagataaacacatcaaaaacgctgtttctgtcgcagctatagccagcgattttggtgtgcaactgagcccgacattcaaaaacacggtcctgcagggtgcgttgccatacggcatatacggcccaagccaccatcattaccatggccaataccaagagcttagttttcattttcgttttcatatttggacatatagtaattatcgcaaggtgccttaccatcgtacgggcaataggttaacaggtcgttcatcatcactctcccagacgcatccccctttttctcggcaaaataatagacattggctttttgtaagcagtttagcttttcattactcacaatcattttaaggttcgcaatgatacgggctttatctaacccacgggtgacatcatcggtgagataaaacttgcattgccccagtgtaaacacctccgtgcgtgatgacttcatactccattggtcataaacactcggcaggatcaaaaatgccaccagcattatcgcgcccgccgacagtgccatttttccttttagccaagagcgggcaacgggcggttgctctgccaccacgcccggagcgggtaacaccaatggtggttgtggttctgctaacgcaggcgctggccgttgctcttcagttttcgccaacagggtaatatcggcctcaaacaaaaaaccgtgcttggggacggtggtgatcaagcccgggcaaccacatttcgccaacgtcttcctgagtatagagacatagttactcaggttattaccggaagcgttcaagcctcttttttcccataactctctgagcaacgtctcccggcttaacaagctatgattattgttaattaacaacagcaacagctcattgaccacccgggtgagcttgatcatatcaatcgcattatctggactcagcaaggtcccatcatcagaattgtattttacaatcccgttaatgatgcactccatatcctctccccaaaaaaactgaacttatctacgtgacaaccgcccctgtacgggctcatccctcctcacttctttcttcactcctccatcggcttgaaaaacagcgcgcaatcttacaggaaaaatctcagcaacatactgtgtgaagccctccttcagcgtaaaccaacgaatccaccatcgccattaacggaataaaaacttaattaaataaaaaatgcagcataaaattttatataacccatcaaattaagtatatatagaaagggcaatttaccgaatgttaagatttatcctatcgaaagccgagcgagcagactgacgaaacacaagcctaacggcgtcaataacctttatttttgcaggtgtaaatcacgccttaacaaccaggctaataacctgaaaaaaaaagccttacgcctattgccatgaaagccctttattttcatgcgggattttgcacacccacggaaagccatgatggaaacgttaatcaaagacagaagtaaacttaaaaattacagcctgactattgagaatagaacattaaaattaaacaatagccaaaaggctgtaaaactgagtaagaaccagacgaaactgctattatgcctgatcaatgagattcaggaaaagcagaccatcatccattatatctggggcatggggaacgccgagacaaacgagagtaactaccgccaactggtccgtcggacccgggaaatattggcaacacatggttttcctgatgataccattgtcactattccaaactacgggttatgtatcaacaataagttaatggaaaagtcgatgatacccagcaaactatcaatgaacatttataatgatcatgcagttctttaaggcaggatgatagtaacattagctgaattagccacaacacattcagaacagattgtgaaacatctctataaaaatcatattaaagataaggattattttcttgaataattaaatcgtcccctgagggttttctttcaggggcgaatttatttttgatggcaggcctagagcaccacatgcagtgccaatttgcagtttatcttcattgtcgttttcatatttggacatagagtaattttcacatggtgccttacccttataagcgcaataggtcagaaaatcggtcatgagcccacttaacttcttatcggtaaaatagctttgcggccaaagtttatcctttcgttatcgacatcgttttaaagattgagcgagtaccagtgttctccagcctcacgggtgacataatctttaatataaaatcgacagcatcaagatcaccatgctgccaagcatgcgccactttcccacttacccaagaatgggaagctgcaggatgttcaatgacagattcaggtaaatatatgacccattcatatcccgccaccaaaaccgtggttattggtctcccgttttcacaagaatcctaacatctgcctcgaacaaaaaatcgtgctttgtaacggtgcaagtcaggtcagagaatcgaatttcgccagcgttttttctcagtacagggatttaatcattcgggttattactgggggtatacaagcctcttttatcccatgactcactgatcaacatctcccgacttaacagagtctggttatttttatcagtaatagctcattgaccatcctaacgggtttgaccatataaattgaatgatctggacaaacatggttccgtcatcggtcaggtattttccagttcgttattgatttagtccatattcttgtccccatatttttgcaggtggtaacgacaaggctagagtagccggatatcctatgggcactaatgccatcctcatgcatacgacgacgattggcgggggtacggcatatttttagaagaattccataatcatcacgctactcgccgtgtagttccccccccttttctcggttccggaaagtgtagaagtaaatactaatggggtactgccaccctttatttctagagttacaccactggtggtgatgggtttcgtgttgacagatagggacgcggtcagcgtggaactgagtctcagggggctggcaagacggaacgaaacggagctaacgtttgagcatcgcagttccctttgcagcaccagccgctctccgttcccctggcctgacgatatcgtcccgtagtcgaacagcaaggcgtcgaggtcatcgcacctcctggtgggttccggtactttcccacacgtggtaccgggcagtagccttccggtgcgatatggacccgcggacgtaccgtcgaacacttggaagccgtagcacgtcgtcgtcaggtcgtttatggcggcccacataggcgattgagtcgactccccgcttctcccatggattttcgtccacgcctcgaacgcatcaacggtcctggttcccataggcacggtgatccgttgattcatccatgtggggttatttataccgccgtagggaggtccccctcgggggtcccatgggcccaccgtcacaatgcaccctcctgcttcattgcaaatgacgctcctgtcggtttcggcgggccacccccattgcagttgggctgagatgaacccaactggttttacccacgtgtacccaacggccccccacgaagcggcgtgtacgggcggagttacgaagtgggaagtcgaggcgagcaagacatacagtgtgatggtacgtaatattttcatgtgtttcacatcagggggttattaaatggtttggtggcgaactcgatagcttttataattagtcaaatttttagcataccctttgcccaaattttccaccgagcctcatacgcccgcaccttntgagcctcatacgcccgcacctttgcctcgatcgctgacggagtcagtcccttagctttggcttgctcgtaaagccgcgttcgttttgctcgatggttctctatcgctctgggcgctatggtggtgcccgtaggggtaaaccatacccccagccagtcaaatccacgttcaattctccccagttgggttttatccggatgaacttcaaaaccgcccagctcgaaaaattcatataatcgcttaaccgaccgtcgcaattgccagcggctgcgggtaagcaccacaaaatcatccatgtaacgcgcataaaaggttccctcctgcgctgcaaaataactgtctacgtgatgtaacaggctggcgccgattaatggactcaacgcacacccacgacaaatgccaaactctggggtatgaaactcgcccgcatcctcaacgctgtaatacagatattgttttatcagccccaccaatacggggtcagagacgtaacgctccacctgcgacagtacttgccctttacggatatgccggtaataaccccgaatatcggtacggtaaacaaaagcatattcgtcactggtaagggcttgccatacctgacggatcgattgccgaccaccgccctggcctttcacatgggcgcaacgttcatgggtcggcaacaggtgctccacttgcatcgccacccacttcaataccagtgcatccgacgcgcaccactgcacccaggaatggccaaagtgatgatgcacctgcatggcggttagccgatatcggccagactttgcgctctcgaacaacgcctcgccacattgtttccagtggtagcgcagatgccaaatatccgcgtctgccggagcatgcctgcgccgcaggcaaagccactgccaggcacgttgccagcaaatctcagcgttattcatattccaaactaaaagtcgctaccgcgctgaacggcccgtgctcaatggtttcattggctatcgcctcaggctcaccctgcacataggctttgaagatgagcaggttgtcgtccttggctaacgggtatttctgcccgctctggttcagcggcaacggctcgccttcggggggttccatacccatggcaatgccagaagcctggctaccgccagccagtgccaacaacccgggtaagttcgggttctcattaccgctgaaacgtacccgtaccgtcgtgcccaggctgagatcgcactccgccaaatgcagcgtaaactgctgcccatgggtacgctggttcaggtacaggtatttgtcgatcaccgtgccgaaatccagctgaatattctcttcccccggcgggatcacgcagggctcagccactaatgcgccatgaaaacgcacgttatcctcccccatcgccagcgggctgagcagcagtgctaccccagccaaagcggtatttagccaataccgacggcggccgttattcccttgcatccgttccgcctccctcattgataattcgcctgtaacgttgccgtagcgacaaacgccccttcttttagcgtggcccccggggtttttaccggcaccgcctcaagcagcggcgggttattcgggtcaatgccgattggctggttcagggtaaacggcttgccgttttgcaacacccgaatgcccagatccgccagattggttcgcaccgccgccgtgtcatagccggtctgctgcccgctcagggtcaaggtcatgtccagcccgctggcccccggctcacagctgatgcgataacccatagccttaaggtagttaaccccgtcgacctttttcactccgacccgctcaccaaaatcgacatcgaccgtcccgccgtcgttaatcttgcagggcggcggctcaatcagggtgccgcggaacaacagattgtccgcggcccacagcggtgaactgagcaaggcccccagcagcaatgcctttatgggtaaatcacacgtcatcgcagtgctcctgttattggtaatccacttttatggtggcccctgccgaaaatgcgcctgcggtcagtgtgctgccagcgcgtttggtcggcaccgcgctcaacgtcggtatcgccggataagtaaacctgatcctggtatttagcggcagcggtacattggcatcggtaataaacagcgcgatacccaaatcagccttgtcagttcgcagcacgttagagccgccaaacgccgcctccgccccctgcagttccaaggtcatggcattgttggtattgccgctgcactgcacgctgtaagggactggccgccgatagttgttaccgtccacccgagtggtcagcacatcattgccaaactctacttcaagggttcccccgccattgattacgcagggcggcggtgccaccacagtgatggtgaccgttaccatagtgatcgcctgtgccaacgtgccgggtagcagcagagcgcaactcaggcacagccgcgcgaggcccctccgttgggcaataccactcaaagtactagtcatagctcagcccaaaactcatctgcgcccagtaagcgccggcctgtaatgacgcccgggtgcgctcgggagtaatgttgtaggtaagttcgttctgccccggcgtcagcaatagcggtgcgccacggctgcccagacgcacatcacgcccccacacatcggtcaaccgcaaccccagcccaccagcgccctgcaccttcaccaactgggggttgtctgcatccgccacagcgctaaagctgacggtaaccgcaggctggttggcgctccacagccggttgccagtacgagcatccaaagtgcgagccgggcccggcagacagtcctgtaagcggagccgcaccaccactggggccccgtggtcgccaatgttgcgcaaccgcccggtgccagtatcgcccagctcaatttcctgccaggcagaggtcatatccaaccggcaagcgctttcggttaaggctccgtgcacacgcaatacgccattggccccctcgacctgccagttgtccgccgcccgcgcttccacgccaatcaccagcggcaccatcagcaccaagatcccccgagctaacagatactgacgttcatggcgtgataaccagcggcgaaagcctttccctgttttatgttgcatctctcactccttttccacgtcattgcgttgcgtcgtcagtggctgtcttttaccggtgtggcggtacagtggccgccactgcaggtgaactgcacctgcgggcgaccgccgtaatcattgatgtaggtcagcaccgggctattgcccaatgcgctggcgctagccttaagagtgcctttgccctttggctccaccatcagcggttcaaagtctttcagtgactcgcccttcaccttgctcctgccatccactagggtgacgaagtacggcgtcgggttatgcaccacgtagctatccccttgtttgctcagagtgattttttcctgccacggcgtatcgccagaagcggtcatcagcgctttggggcggtagaacagtttgatgcgcgtttgcagcgcgatctgtagcgtattgggcttgtcggtgcgtgggggtatctcgcgcaggttgaaatagaacagcgattcccgatcctgcgccaacaggttggcggctggcagcccctgcacttttacctggctattggcacccggctccacacgttgcactggcggcagaacggttaacggagtggtgatcttgttaccctgtgcatcttcaatccagccctgtgccaggtaaggcagttgcttgttctcgttgctgatgttcaggctgagggatttttgactgccgtcataaatcacccgggtacggtccaaagcgatggccgcctgggcggactgggccgtcagggcgctaagcagtacgccggtaatcagtggtgctgttatggtcaatttcattgggtggttctcatgcaaaaaatggtcaatttcgattgttcgcgttatgcagcagcggcgtttttccctccccctctcccaaagggagaagggggtcagatcggcgcccgctgtcagagccgtttatcacttcaattcggcaagagcgcgctagcatttaccgtcaggctccatcctcactcacatccagcaggcggcatggcagcagtaggtcggtcaggccgctgttggggattgtgtccggcaacgtcagctcacactgcgcccgcccgccccagtgcacggtcattacctcaccggcgttgatgccgctcaggtaaatgctgccgccgtcgttgacgatgcccacttcctgctgtttatggttcagcaccgtggcgccaaacggtggggtagaaccgtccgccaggcggatcaccgccatggctttttcaccggagatcacctcgaagtgccggtagccgatcgcaccttcagttaaggtcgcctgtaccaccgaatgggtggcttctgcggtatccggcaggttgttcaaatcgatgctcacccgattgcggtaatagctgcccacgtcggagaccaccaccttgccaaaacggttggacagagtgctggccccatagccttggatcggaattccggctacaccgtcggtgtccagcagcattcgggtaccgcccagtctgccagctcggtgcaacgcagcacctttcgcagtcgcggtagcgccgccctggaacgacagccccaacgaggagtaacgcccggcctgatagctggcattggcgcccatctgagcgatatcgcccgggtggttgtaatagccactcgccgtcgccccgccgcgtgaggtgcccacactcagttgatagctgtcgtgatcgtttaccggttcgaaataccccacctgttggctgttgtcgttgcggttccaactgctgttgtagttaagggagccacgattaccccaaggcactgagagccgcaaatacatgccatcgtcattcaccccgttgtacttattacgataagcgttgactgaaacgctcaggttcctgaatcggccgatatcgaaattacgctccagcgccaggttgtagcgatcgttatccggccgatcccagtaggtctggtgttgatagtccagataggcgctcagccctaaactgcggaactgctggttaaaggtgatggtgtacatctccttgctgttctgcgagcgcgtgccgtaagtacgagcatccagatattcactcatgctcatgtagttctgctctgagaagcgataaccggcgaaggtgacctggctatcgtaatcatcaaagcgtttggaatagctcacgcggtaagaaccaccgcttagcgtttcatcgctaaacggcaaacgggcgcgggactgggtggcgtcaaacgacagcgcaccaaacatcagcaggtcacggccaatccccagcgccaaggcgttatagtcacccccagctaccccgccgccgtaaagcgaccagccgttgctgacaccccaggaaaactcgccggtagcaaacagcgggccattgacatggtgacgccaatcgttcggccgcccggtggcgagcttgtagcgcacggtgcccgggcgcgtcagatagggcacattggcggtatccatcgtgaacgcctgcacgctgccatcctgttcctctacccggatatccaactggccggagaccgcgccattgatgtcctgaatacggaacgggcccgccgccacctgagtctcttgcaatacccgcccctgctggctgatcaccactttggcgttggttttcgcgataccggtaacttccggcgcatagccgcgcaggttcggcggcagcatgttgtcgtcggtggtcaaactgacaccgctaaaccggaaactgtcaaaaatgtcggagataaggtagttctcccctatcgtcaactgggcacccaaccgtgggatcgcccggtaggcgtaaaaacggctccagttccagctattctgtgacgtttgctcggaaccggtctgatgattgaagcgagcctgccagtctgcacgtaaccgccaggcaccgaggttggcgcccgtcgtaccgttgccgctgaggttatagctctgcgtgccgctctgctgttgccgctgggtctgagcattgacgttatagtccagcagcaacccggggatgccctcatcccagcgcgatggcggatcccagttatcggcggtgtattccaggtagacctgtggaacgctcacatacagcttggccgcccccaaatcccctttggtactcatccctggcaggctttcgggtaccaggcattgctcctgatgccaccaggccagcttgttcttcatctctggctttaaacccaattgctcaaccagttccggcgtaacgcaggcttcactgcctttcggatcgttatccggtgcataaaaagtcacgggttgctccagcaactcttgcttattaatctgcactgccatcatgtagtcgcccggcatgatgtaaccactacgggaaaactggtctaaatcgatattactgcgatcgttaacgtctaatacgtcggtgttaaaactgaattcattagcttgcgcggagaccgtagcgccaccaatgatagtgctgatgattaatcccagggtacgcggacgcgaaggcaatgccttaaaataagataacgccattattttcagaccttttatattattccattaagcgctatttccattattttaaataatgactacgcaataaatttacccatcatcagtggagaagcggtggaggtggatcagtaataatccattttaaatttcaccgtcgaattgtactcaccggcacgtaatacctggcgattactcaccaagcgtaaagaataatttaataacatctcactgggtctaatctcgccaaagggcaatggtgcgcccggcgtggcgatatttccctgaccgtctgaaatttgtagtgccaggcctctggctgagccggatatgctaaataacccagcgtccgcatgcccatcaaaggtgatttgaaagcggcgccagtccggtaatgttttatcgttacgcgtcaggatgcagttcaccaagcgaatagaaaagggccgtatgactccctgaccatcgcgggcaatttggccgattggcaccacgcccatattgatggtttgatcacggctgctgatgtctatcgcgcaggcggtttcaataatcgcccccaccatattcactcttccccagccctgtgggtccttggcccatccctggcccacgctacacagactcaacagtaaaaatagagtgtaaccgactgcttttattgacataaacagtactcgcaaatggctgccgggaaggcatgcatgtgggcagccccacatgcacaacctattgctatatcactgataagccaaggtaaagttagctacgctcttgaagtcacccggagtgatggttgcagaagcaccgtcaccttgcaggtaggcggagaacaataaggtattcttgccattttgcagcgtttgcgttgcagtcgcatcacccagtttaatcagatggccatcgccgtctgtcatgatgatgctggcacctttggcactaccagcaatacccagcgaaccatctggaacgcctttggcgccggtgaatttagcggtaactgatttacttgcatcaccactgatgttgcatttttccaggcgaatttcgaagaacttaggtgtagaagtacctgtgttgccatcgtcctccagtgccacgttcgatacctgacccagattaacggtttggtcgatagtgtccggatcgatagagcatggtgcatcaataatagaaccggtgaaggtgacagtaccatgcccctggtctttataagcaacatcagcagctgcatgagcgaaagaggcgatcccgaaggtcaaagagacagcgagaacaatcttgttcaatttcattccatattcctttaaatgcttaatggtgagagcatccaatgcgaatatattgaatatatagtcacacagctctcaacgtttatttattgcttaacgctattattgagagaacaataacagttaaaacaaaatgtcgacttggcattcgcgattgattatgcagaagccccttgcgtcggaacatattattacaaacagaatagtctgatgaaaagcgcaaaaatagatccaggtcaatttcgccataaaagcccaaggtggtttaaataaagtcacgcgcaaaaataaataatctaaaaaaccaccacaaaacagagtataaaactagcatgcaattcattatttatattttgatctgatttatgttgatttgcgacataatcgttggataatacacaaaaaacgccaccccacccgttgtgatgacattgttctcggaaatggtcatttattcaagtaaaaacagagtgttattcaataactgcccgtgcagaatagcgttctaatgaggttcatcaattagcatgcagtatcttatgccattagcaaaacatcagtcccgacagctactgccaataggcatagccttattgtggctactacttatcatgccgctatatctacctaatatgggtgggagtggtttaaagctgccgcaaaatattattacctggggcgtgatggccgccgccgtcaccacaatttggctaacgctgccggctaagaaaatcatttctcttactgcaaccacccgctggctgctgctggccatcgtcattttggccgtgcctttgctctatacctccccccaatggtgggacgttgctttttcacgctggtttgcgctggccggtggcgcggtattttatctctctttgcaacagtgctcgtcgctgtaccgctggcaaccttggctactgtacgccatcctgaccgccactgttttccagaccgttattgcgttactgcaattggtggtgccggatgccgtacctgaatggtttgcgtacccacagctcatcggacggccttatggcgtattccagcaagtaaatgtgctggccagctttatcgctaccggcctggcactggcgttattgctatttttgctgccgggctttgctttaccctgcaaaaaagctgagcgcctccggcaatatgccttagggctcctgctattggtatttccagcgctcttggtctggctgcaatcgaggatcggctggcttggcggcggaatctccagcgttctgctactgctgctgggctggaaaacggcccgggcacagactctcgtcgccgtaggcatcatcatgctgagcgtcgctttggccattgctttccagctaagcggcaacattgcagatgtagtacatgcaggctcaaaccacgcccggctgacaatgctaagcacaaccctggacatgattagcgagaaaccctggctgggctggggatacggcggcttcgaatatagcttccagcattatcggttggcacagggattctccactcagggcctgggtgtcgtgacccatcctcacaatgagctgctgttgtggtgggcagaaggcggtgtcgttgcattaatcggggtgctgatactgatttatgccggtgcaaaattggtgtggcgagtatgtcggccagcaaggcacgcaaacccacagcgagttaccctggcacgggcgctgatctgcgtactgctgccaatattgctgcacacccaaaccgaatatccgtttaccctttccaccgcacattgggcgatctttttactgctgttggcacagttggatcggctgaccagcggagtaacagaacgccgttcactttcagcgcccaccagcgccttgcttagcggcatgatcccggcactttccgcagcgaccctgctgctggcggggtgcggattgaatgccaacctggctttaacttccgttgaacgtaaccacctggcagacattgaaccggcccgcgtggcgatgaaatatgatctgtgggtgaatagcgaacgctggcactacgaccaacagacgcacgctctgctggcctttaaccaaacccgcgatcctgccctgctcaacggctatgtacgctgggcacaaaactacctttcccgacgagtcgacaacaatgtttacgcttcctggctggccatcgcgcaataccagcaggatgcgataacccacagcaggttaggccaagaggctcatagcctgtttcctgacgatacgcgttttcttgcccccttttatccctaaatgaccggaagctattttatgacaccgatactgcaagtcctgatcaacgacctggatcaatttttttctgccgggctagaaaagctcttaacggaacattttatcgccaaaggcattacgttacgttttaccaataacccactgtcgtacccgctggccgatttgatcttctggacgccagacaatgctcattatcgactacccagcggcctgctgactgaacgatatctttcctcccgcttaatcatcgtcacatccggggagaaaaacttccttttcaatcgcctgattcaacgtaggtttaatcggcaccaatcttgtgccgccttgctagcactggttgatgaagccatcagtaaaaaggcctcctatagccatgaagagctggctgctattgaaaacccaatggccttactgacgccgcgccagaaagaagtgatgtattacgttgccaaaggtatgcggaccaacaagatagccaacaacctgcagctacatgtaaaaacggtaagcggccataaacgagccgcgatgggtaaattgcagcttaaacgcacctctgatttacataactggctgctgcataaccctatctcacgtcacaccgcgtgactgcccccatcgtaaatggactgcctcccgaacaacaggcacaggttcctaccaagcagagcttgaggcagctcggacacagccaaaaataacgggaacccctgggttcggtgcagcccaagcagttcagcgggcaaaatggaaatcagtggcgttcaaggctactttttagcgtcggttttccactgtagtaagctggcaatatccttttccccttcggcctcttttaagcggcgctgctgctcggcaaactggacgtattcggcctgtgctttttcatctgcctctttcttgctgacactacctgcgccctgtaatacatcacggtcgttaaattgcaggaattgatcgagcttttcctgccagtcccgcaggaatacctgctggcgacgccgggcctgatcttcagcaaaatccaaccacatgttgaccacgcggttgagctcgccaacttcatcctgattgaggtagtttttcgccaccgtcacatcgcttttacgcacctcctcgcctttatagctgctcaaccccatatgaggctggctggcattggcacgctgatggatgagttcggcagcggtatggccggtacaggcaaaatgcagtttgttctggatggtttgaaaaaacagcgtggtctctttgagtgagggctgatagtcggcggctaacgcaaagatctctcgtacccgcaaataaacccggcgctcgctggcgcggatatcgcggatgcgttccagcatctcgtcgaaatagtcaggtacagacgatgttccaacgggcggatttttcagccgttcgtcatccatcacgaagcctttgatcaggtattcctggagggtttgggtggcccactgacggaattgggtgcctcgagaagaacgaacacgataaccgaccgcaaggatcacgggcaggctatagtgaagcatattgcggcttaccctacggctcccttcctgttgaacttgtaagtaagacttacaggttgcgttttgtacaagttcaccttcttcgtagatcgctttgatgtgttgcgtaatggcttgcggagtgacctggtaaaggttcgcaatggtcgcttgaggcaaccacagtgtttcgtgctcaaagcggcattcaacgcgcacctcaccgtcatcactggcaaacatcacaaattcgcccgccggggattgagttaagtgtttatctgccatgccgcctccgctttaatccgacttaccatgctgtatctgattagtatgccagagatagctgttggagctcattacacgaatggcgtttattttgcgtgcagttacgcagaaacaaccgctgacctcgtcctggttaaggcaatgcaatgagcactttatcaatgcccccagattgatgctaaaagatcccctttatccctatgccgctcacagattcattactcgctgttatctttcgacttctttcaaatgtatacatcctgtaatctattaagaaaatactaactatggtgggcgtatggcagggaaagccgtgattttacaaggcgacaaaacctctcatggtggagtcgtgttacagggatcgtcagtgatgcagttctgcgggacgaacgtagcgctggtggggcatttggtttcctgcccgcaatgcaaaggtgtcttccccattgtcagtggtgcagaaactgcactggtcggtggggtgcctgtggcgctggaaggcatgaaaaccgcctgcggggccgctctgattgcttcacaacatgaatgtaatgcctgacggcaacgtcgttcagcgctaatcactccgccagaaccggcagagtcgcaaaataatggacaagactcttcaccagggagcaaggatgccgtggctacgttagatacgctacagaccgattcagacattttcccaccgcgcacctcactggccgccgggctgcttgcaacgctgaacggcagtgaatatgcggtgagccacgcggacatcgcactgttgctgcgcgccctgccggaacaaggccatggcgtcaccctcaacattctgctgattgatcgcctgctgcgggaactggagcggcgcctgagtgcccagatggatgccatcctgcatgctccggcgtttcagcgcctggagtcgacctggcgcgggctggccctgctggtcgataacattccgtttcacgagaacattcagctgacgctgctccatgccacccaggaagagctgctggcggatttcgaattctccccagacattacctcctcgggctattaccagcatgtctattcggcaggctatggccagtttggtggggtgccggtagcggcggtgattggctggtacgatttcacccccggtgcaaccgatatcaaactgctgcactacctcagcgtggtcagcgccatggcgcatgcgccgttcctttcggcggcagacgccaccttcttcggcgttgattcattggccgatctgcccaccattcttgatttggacgcggtcatggctgcaccgacacatatccgctggcaggcgctccgggctaccccggatgcccgctatctgggcctgaccgtgtgccgttttttgcagcgcgagccttataccccggcgtcacagcagatccggcaatttgtctatcaggaacagatcggaacacatcagcacctgctgtggggcaacagcgcctttttactggcgctctgcctggcgggcagctttgcccgttatcgctggtgcccgaatattatcggggcggagagcggcggagcgttccgtaacctgcccgctcgctacactgcggcgctggggcgttggcaagaaaagatcccaaccgagacgctgctgtcggaccagtggcagtaccgcttgtcgatggccgggtttattccgcttggggtgcgcaaacaagggcaggacgtggtgttttattcggccaactcaatccagtcgccacaatataccgacctcacgcctgaagggatgaacgcccgggtcaatgaccagttgggggcgcaactgccttacctgtttatcatcacccggctggcgcacaccatcaaagtgctgcagcgtgagcggctgggtagctggcgcaatcggggcgacctgcagcatcagctcaacaactggttaaaacgctttgtctccgatcaggaaaacccaccagccagcgtacgcagccgccgcccattacgcgctgcacgcattgaggtgcaggaagtcgcgaatgatcccggctggtatctgacacagctgcatgtgcagccgcatttcaaacacatgggctccaacttcgtcctcgccttgaccgggcgtctggataaataacctccaagacaggatgtcttcagcatgaaccgggataaacatcggccattccctccagcccgtcggcgcaaagcgctacaccaggctgccgaggtgctgcaacaaacacatgccccgctggtttccttcctgaccgcacccaaccacgaccccgatgtggagcggcaactggagggcatggcctggatgaccgggcagttagaggggcagttggcagaccagctcccgaacctcacccaccatatgctggccctgttgtggccctattttctgcggcccaccccgagcatgaccgtgctggaatggcagcaggattacctgtcggatcccgcgctggcttgcccccagattgccaagggggccacggtggtcagtatcccgctgccggtaacgaccggtaaggaaacgctgcggtgccatttccgcacctgccgtgatacccggctgtggccgttacaggtgcaggcggtcagccgcgagcagcggcacggccatgacagcctgtgcctgcaactggtcaccacggcggatcggccgctagacctcactagcctgaacggcctgcggctgtatctgggggaagacctgcacaccgggcaacagctgcatttgtggctgagtgaatacctgagccacgccacgctggaagtggggggaaagacgtggccgctgcctgaactggcgctcacgccggtcggtttcaacgacgaagaggccctgctgccctggccacagaatgccgatcccggctatcgcctgttgcaggaacacgcctgtttccccaacgcctttttatttatggacgtgacggggttccccagcctgccttcactgcctgcctctcacggctttaccctgcggttcaccttctcccggcctttaccgtccgccctggttatcaaccgccagacggtgcgcctgcattgcacgcccgccatcaatctgtttagccactacgctgacgggctcaacctggacgggacgcagtcagagttgccgttattccccagcgtgcgccatcctgaggattacgacgtattctcggtggatgaagtgaccggcgtatcagccctgagtgatgtcccccgccactatgcgccgtttgaacgctttagccagcaacaagacgcggggtattaccatgtgcgggtcacctcgtcgcccgtggggggcttgaaccatcacctggcgttgatccgccacggggaaaacctggacaacctgccgccggaatcggtgtccgtccggctcacgtgcagccaccgccgcttgccgttgcacctgaaagtaggagaactctgccaaccggccaccggctgcccgcctggggtccgcgtacacaatatcacccgcccatcggtccccctgagcccaaggttggatgctaccttgcaggcggccctgctgcgtaatctctcgttgaacagccgctcactgctgacgctgacggcgctgcgacaggtgctgagcgcctgcgatctgcccgcctggcacagtgaactggcagcaggggtctcccggcggcgcagggcggggttactcagcctgaccgtacgcccggctgaacgccatatcgacggtgtgccgatcgatggcctggcctcggtgctgacggtgcggctccaaggggcgtttgactcggaaggcgagctctatctgtatggtcgggtactggcacggttcctggcccaacgtgccagcgtcaaccatttccataccctcaccgtggttaaccaagataatcaggagtcttaccgctttctatgatccccagtgcagagcaggagcagcagctccaggttatcgccgataacgttagccagtatgacttctaccgcctggtggaagggttgaaccggctggcgggcatcgatcccggcccgcacgctcggcctgccgccgaaccgggaggcgttgcgctttaccgccgctgccgggttgggctttgccgccagcgatgtggtggcgttgcaacatgaaccgggtgggccgctgcgtcttgaggtgagcttcctgggcctgcaaggcagccagtcgcccttgccctattactacttggatgacattgccgggagcacggcgcagggagagacgcggctcaacgattttctggcggtgttcaaccatcggcccctgtcgttggcgcaccagatttggcgcaaataccgctatgagatcaccttcaaaccggggggccgcgatgccacctcggggcgtatttttgccctgataggcctgggccatccgcagacgcgagagcagttgggtatcaacgccgaagccatgctggcctacgccggtctgctggcctcaccgggccgctcgccggaggtgatcgcccgcctggtcggccacttcttctcgctgcctgatgtgacggtgcagtcttgtatgccccacgtcatgacgttgagtgacgaacagcaaaatcgcctggggcaggtcaccgccgtacgcgggcaacgccatcaacctcgttctctgctggggggtaactttgtgatcggtagccggatgcgcgatcgcagcgtcaaatttcaactgtcgatcaatgagctctcgcaggaacagtacctgtcgtttttgcctgacggtaagcagcatcgcctgctggtcaattttgtcgagtacatcctgcgcgaaccgctggtctgggatctgcgcctgacgctggcacggcatcaagccggggggctgaagctcggcgacacacaacggacccagttggggtggaccacctttgtggggcaacccgaagagaaaccctacaccctgttgcccgtgcgcaggtagccaacgtcaaggattgatatgaactttaccgatcatctcagagaggaacatgcctacctgcgtgcactggcggacaaggtggggcaggaaaaacccgcactggccgcgcaactaggccgccatgcgggcgatccggatgtggaatgcctgatccagggggcggcaatgctgaatgccgggctgcgccaacgcctggaggacggcttccccgaagtcacacaggggcatcttgcgcgtacctggcccttccccctgcggcctattccggcctgtggcgtggtgaacgtcagcgccaaagccagcacgctggatgcgccgttaaccttgcccgccggagaatcgctctccctgttgtccgacggacgtacgcaggtgttccagacctgccatgccttgacgctacagccgctggccctgattgaccggcagttgctggtcacccactcccacagcgagatccgcctgacgtttcagtaccaggggccggggaatacctggccaacccagccgctgtcgctgtttctgggcgacgacccacaggtggcggcgacgctgaccttgtggtgtgaacagcatcaggaccggcccgtgctacaggtggaaggacgacaatgggtgctggaaacagtgttgtcttccccacggcccactgcggataaccgcatcctgccccacgaaggggaaaccacctgggcgctgcagagcctggccgaatacctatacctgccccatgtgaatgatttcctgacgctggattttggcccgatgcactcagggctgacgttggggaaaagccgtacctttaccgtcatactcacgttcaacggggagatcccactcacccaggcccaactggcgtcggcctttatgctgcactgcgtcccggtcatcagcctggcggcacagaaaagcgcccccatacggctgcaccccgggcagagcgtttacccgctgccatatgccgacgatcgttgggtgtatgccatcaccggcgtcagcatgctggaagagccggatgccctgcggcggggccgacgggtgcaattccagcccgacagcgaactgacgccggaatcgcgttatgcacccgacgccgggttggcgctgttttacaccgtgcgggtcagcggtgatgtcctggggcggatgcagcatgaactggtgctgtgcaacagtgccggggagccgctgaccgagcccccttgccgggccgtggtctgcgatttgctcaccacctcggcgcactcgcccacgttaccgcttggttcccctttcctgctcggcatggcggtgaccgacaccctggacgtcactaccgtcacccgattttcgaccccgtacccggcggtggtggacagccatcaccattggcggctgatggcctgcctgtcgttcagccccgcgcttctcaaccaccgggaaacggtgcagcgggcgatcgacgatttctgcctgcacgcccggcacaacctgccccaggtccggcacatccgccgggcggtggagggcatcaccgccgtcaagaccgaaccggtgaataccctgatgggggaacggctacggcgcggtttgctgatgaccctgacgctcgatgacccggcgttcgacagccccggcgaagcctacacctttgcggcggcgctgagcgtcttctttacccattgcctgaccaccaacagcttcctgctgctggatgtgataaccgaaccttcacagcggcgctgggcattgcccctggcgcgcggccaacgagccatgatgtgagacaccacaaggagtgaacgatggacagtggattatttttcagcagccaactcggtgaactgcctccggacacctttgacgtggccgattttaccctggaagaagggttatcgaccctgtttaccctgacggtgaacctggtcagcacccggtcagacatcgaactggaagcccagttgctgcaaccgggggcgctaaccgtcaccgtcagtggcaaggaacaacgcacgatacccggcctgatcgccagcctgactcagggagaaagcggttttcgccgcacctactatcaggcggtgatccgcccggatgtctgggtactcagcctgaaacaggacagccggatcttccattttctatccgtgccagacatcgttaatcaggtactggacgaacaccgcatcccttaccagagccatatccaacagacctatccaccgcgtgagtacgtaacccagaagcgcgaaagcgacctggacttcatcctgcggctgatggccgaggtggggatcaccttctggtttgaagataacgaactggtgtatggcgattcacatctgagcatgacggaaggtatcccgctgaccttcaacccgcatatccagtcgccaacccagggcgacatcgcccatcggctgaccctgggggcgttcatgcagtcacgggaaagcgtgctcaaggatcgcgagcatcggcggcctgaccatcccctgcagtttaagcagagcgaccctgcattgggcggtgaagccacccaatactcggtatttgagagctatggccgttatcaggatgaccagaccgggccgcagctcagcaccgtgcggctggaggccatgcaagcgggcacccaacagggcgcggcagaaaccaacagtatccggctgatgccgggcacgatttttaccttgcagggccacccggtgcaggcgcgtaacgatcgctggcaggtgatcaccgtcagccaccgtggggagcagcctgccgcgctggaagaagagagtaacggcagcggtaccaccttcaccaactcgctgacctttgcgccggggaatatcgactggcggccaagctaccgttacaaaccgttggccgacggggacgaggtggccaccatcgtcgggccaaagggcgaagagctgtacgtcaacgagctgggctgggtgcgggtgcatttccactggaaccgttatgacccggcggatgaaaaagcctcctgctgggtgccggtctccaaccagtgggcgggggacggttttggctcggtgacgctgcctaggattggccaggaagtgctgatcagctacctgaacggcgatatcgatcgcccggtggtgagcgggcgttactacaacggcctgaacaaaccgccgtatccgttaccggccaacaagaccaaatcggtctggcgcaccaaatcgcacaaggccgagggctttaacgaactgtcgtttgaggatgaggcgggcagcgaggagatttacctgcacgcacagaaagacctcaaggccctggtcaacaacgatgcgcactgggacattcgcgccaaccagagcagcaagattggcggcaacagcctgagcgaaatcgagggcaaccgggaaagccgcatcaagggcgaactcacgctccacaccagcggcaaaaagtctgaactggccgacggcgaatcccatttgcaggttggcagcgcctatgtggtgaaggctgggcaggaagtatcggtagaagccggggccaaaatcaccctttcggcgggcagcgagctaacgctcaaggccgggggaagctttatcaaactggcaccgggggccattttcacctcgtcgtcgttgcaggtaggcagtggctctgcgggcagcggacaaggcgtcaacctgaagatgccgggtgtggtgccgttgttggccgctcccacgctgatccagcagggtgtgcttagtagtgatgccccttattgcgaagagtgtgagaaatgcaaagaggaagggtgcgcaatttaattggccgctcatcgtcaaggaggaataaagatgcaacagaccgtacaggactgggcaagaaacacatcgggaaggccgttgtacgccgtcttggccaataccaacggtgcgcaaggtatcaaggcctattaccgggaggatggaagccgcacgccgtacgggctttatgccaatacgccgtatgccaactggttcgaggtgatgccggtgctggtgccactcactgacggcagcccgttcctgcgctgggtggcagaaacgcccctgcgcaactggggctggttggcgcgttcaccgttgccacaggttgccctggcggcccaccttgccggtttgactcaggtgatcatgcctgggggtaaagcggtgtttttccgctactgggatgggcgttttctgccggcacacctgagttatatgggggagcactggatagatgttctgccggtgttctcggattactggataaacggcgaggtgtttacctgccaggtagatcccgcggcgcgggcccaggttagcccctggtggcaggtgccgcaacgtcttattgaccaacttctgaaaacggatcctgggccggtgattgcccaggcattacagcaattgcaggaaacccgtgccgatctctatgggcgtttttcccctgccttactggagatgaagatccgacatttactggtgcaaagccatgggcagcgtgaagggctgatggctcgcatcgtcaccacattggagagtgagtgatgagttattatgggtatggcaacaactcgacgacgtataccagcagcgcatacgggaattacaacaaacgggtgacgatccctgctgaccccctggcccctgaaacgcgttaccaacaagtcgtcagcaactttaaaaattgcctgaatcgctaccacgatacgacagagtttccgctattgggcagcttgctattgatggatcaagaggtgaaggtcggggactttgtcattgccaccaagcggatagacgatgaaaagcttaacggcgtcatgcagtgcacccttaatcaacccattaccctgacgcacgcctttgaagccaaggggtatatcccaatcgcgggttcgcccttcaagatcatcaaacgtaagaaaaagaccccggagcaatttcggcagatagcctacatgagtgtcaaccaggcgtacgggccttattacaacaacatggcatcctcggactttgaggacatcacggtgctggatggcctggccttcgatgacaacgggatggccaccatcaatctgcccgagtgcgacgatgcgtatacctatcacgttgtcgtcaacgcccaggccagcagtgaaagtaacctccagcggctggatgaatcctacagcgagctgatcgtcaagtgtaccaacctgctggaaacccagtggaaaacacaccagcaggcagcctggaaggattttacagacagaggctctcaggtggactttacccaggcgttcaaagcattttttgcagggttacgcgacaaaatcctcgaactgtacgagacagccaaaaagatcgtgcaatggatcaccagcgagaacctggatgccatgctggcttatatcggccagaagggggtggataaaatgaaagagctgtatgacaccggcaaaaaacagattgccgatacgttggtgatcctctccgatgagatgctgatgtttatctgtgcccacgctctgtacagctacttttgcctgctgacaccgcaacagatcgccgattttgccgggggagcggcaggcgaattggtcatgatgctgttgctttacatcgtgctacccggtgccgtagccaaattagccctggatgggttggatagcttagccggtattagcccggcccgataatcaaggagagtcaatgaaaccgttatttcgtgccaatgccggtgcagggaaagcgatcatgggggggataaaataaatcatttccctgatcaatgaacacatcccccattatttggccaagaaccctattcgggcaggggctgttccgttaaataccaaaaaaaccgcgaatattgactctgctggcttgggcaagaacctggaaaatcagagcagtctacccactgggtccaataacctgcatgaaaccaagtttgaatcgccggtcacccaagccaacagcagcggtcagaatccgcagggcaaggcgacgccaagaagcgagcacgctgatatggacggcgatccgatttcgttgtgtacgggcgaagaactgttgacgatcgccgaaggtagcttgccgggattgttgcccttcacctggcagcgtttttaccgcaccagcgcctgtgagttggatctggggttggggtacggctggagccatagcctttcccaccgcctgcattttaccgacgacaccattgtctggcataacgatgaaaaccagcggacccccttcccctatccgaatgccgaacaccctaccctgaccaatgtgctcgggggcgcggtgctggccctcggtagccacgagaacgaatacagcctcacctttggcggtggcgctggggtgtatacctttgtgcgtgagggagaatgggggcggttgaccgccctcagcgacaaatatcacaaccgtctgcaactggaatacgatcgccagcaacgcctgatccacctacagcatgtgcagggccggttgttgttccagtacacggacgatgactcggcgcacatcgcgcaggtccatttgcaggcactgctccgtgaagaggcctatcgtgatgcggtctgggtgacgcagcaggtgctggcacattacacctacaacgcggccgggcaactggccagcgccctgaacgcctgtggggagcaggaacactaccagtacaatgaggcccatgtcatcacacagcgccagttggcgggcggggcctgttttaactggacctgggaaggcgtggggccagcatcacgctgtatccgccagtatggcaatttcgcccagttagatacccgttacctgtgggacgataaccagcggcaggtgacgctacggcgctgcgacggcagccaggagatctatcaatacgacggccaagcccggctgattttccggcgggcagcgaacggtgcagaaacccgccatacgtacaacgaagaggggttacgcgtcagtaccaccgatgcgttgggccagcagacccgttatttttatgacgacgcgggtaacctggtgctcgaactgagcccggatggcagcatgacacgctacacctatctggacggtcagctcaagcgggtggccaagggcagtggtcgcctggagcaagtgtggctcaatagcattaatgaacatggggatatctacgcggcgcgctcacctggggagcaggtgaccgagtacgactatttcccgaacgggcagatgcgtgccgttacccatcctgacggggtgacacaaacgtatcgttgggataacgtagggcgtttactggagagtaccaccagtggcggtagcgtgcgccgttaccgttataccccccttggcacccagccgatcgccgtcaccgatgaagcaggtaataccacccattttgtctgggatgcgttggaacggttgctggagcagaccacgccggacggccgcacccagcaataccgttacaatgcctatggcaaggtgaccgaatcgcgcgatccggccggtttggtgacccgctacgagtacgccgctcccctgcatctgctgacgcgcaaaatcctgccagatggcagtgcgctggagtaccgttacgacaacacgcacctgcaggtcagtgagatcctcaatccgaaaggggaaagttaccgcctggcttacaccgcgacgggcctgctgagtgaagagatcggctttgacggggttaaaaccgcgtatgcatacgatctgaacgacaggctgattgaaaaacaagagtacggcaatcagccagatgcggagccgctggtcaccacctaccagcgcgactggcagggaaaactgctgcgtaagaccctgccggatgggcaggtagagcagtacgactatgatgcactggggcggttaattgccgtcaatgacgggcagacaccgctggcctgggaatacgacatcgccaatcgcctggtggcagagcaccaagggtgggcaacgcaacgttatcagtacgatccacatagcgggttgctgaaaggcagccgactgccggacggccaacaactgggctaccactaccagcatggccgggtgcaggggatcacgttaaacgaacagccgctgctggcgttcaaccacgacaacgccgggcgcgagcaggagcggcggcagggcaacgggctggtcaaccgctaccagtacgatagtctggggcgtatggtagagcaccgcttgcagggaaccggcgaggtgggcctacagccactgtgggagcagcattaccgttaccaggcgcagggtgaactagcgagcatcacgggcaatgccccacgggaatacggctatgatgtgcgggggcagttactgagtgcccaattccccggcagccacacggcggtagatcggcacagcgtggcaggggaaaacttcctgtacgacggggccggtaaccgggtcagtgaacatggcgagcgggacagcgcccctggcaaccgg

SEQ ID NO: 205 - DNA, 451 bp, unknown
  Altogen  635822 strain
  misc_feature (189)..(262): n is a, c, g, or t
  misc_feature (341)..(424): n is a, c, g, or t
gccatctgcgccggtgtcaaaatcccgcagcgcagcaatgctgcctggtcagtcttgatccaccggccaatgaacaatgcccgcggttgcggcacctgctggtagtacagctgcgcggcctggtactccggcgcatccatcccgaaatcatcgcccacctgggtaatgctggtataggtgcgcatgcgnnnnnnnnnnnnnnnnnnnnnnnnnnnnnnnnnnnnnnnnnnnnnnnnnnnnnnnnnnnnnnnnnnnnnnnnnnatattcaccgtcacactgacgacgttatttactggtaatccgagtgacataagtcattctccgaagaattgaaccggtnnnnnnnnnnnnnnnnnnnnnnnnnnnnnnnnnnnnnnnnnnnnnnnnnnnnnnnnnnnnnnnnnnnnnnnnnnnnnnnnnnnnttgttcgctgaggaactcaggaaccgc

SEQ ID NO: 206 - DNA, 2838 bp, unknown
  Altogen  635822 strain
tctgaaaattcggcgacacaccagggataagggggcgttcgagttttctgagattatctattcacttccaaaagagctggggctatcagctccctctccctgtgggagagggttggggtgaggggaacaaccaaatagctgcatttattaccccctcctctgtagcttattaataaatttgacaaaaagtaacttttgtcatttatttgatgccgctgttcgctcagccacacccgccatcaaatcagataaaaaaactgactgaggccgataaaacctattttttatttcaccaggaagggaatatgccgctgcatttaagtcatttaatcttgataccgctattaacgttggtggcttgccatcaacccactgctaccaaccccacccattccctcaccgctacggctaaaaattcaccggcgggggtaagcaatgcccggttggaaatctcgcaaagtgcgctggaatataacacccacaagattcagcaactgttgggcgataaaacgaccctttgcgccattttgaaaggggatgcctatgggcacgacctgtcgctggtggcccccgtgatgatcaagaatcacgtacagtgcattggcgtggccagtaatcaagagctgcaaaccgtgcgcgaactcggctttacgggccgcctgatgcgcgtgcgcaatgctacggaagcagagatgcgccaagctactgactatgacaccgaagagctgatcggtaatctggaaatggcgaaacgcctggatgccattgccgctcagcagggcaaaaccctacgtttccatttggcattgaactctggcggcatgtcacgtaacggtctggaagtcggcgatcgcgccggattggccgaagccaaggctatctcagcactaccccatctgaaaatggtcggcatcatgtcccactatcctgaggaagatgcggcagcggtgcgcaaggatctcgcccgcttcaaggttcaatctcagcaggtgctagacattaccgggatcaaacgcagcgacgtgaccttacacgttgccaataccttcgctaccctcaccgtaccagagtcctggcttgatatggtgcgcgttggcggggtgttttatggcgataccattgccagtaacgactataaacgcgtgatgaccttcaagtcatccatcgcggcactcaaccattaccctaagggcaataccgtcggttacgatcgcacctacacactgaaacgtgattcggtgttggccaatatcccggtaggttatgcagacggctatcgccgagtgttcagcaatgccggtcatgtactgatccaggggcaacgggtgccggtggtgggtaaaacctcgatgaataccgtgatggtagatgtgaccgggctaaagaacgtcaatcctggtgatgaggtggtgttcttcggtaagcagggtaatgcagagatcaccgccaccgaagttgaagacatcagcggcgcgttgtttaccgagatgtcgatcctttggggcgcgaccaataagcgcgtattggtggattaattaactcccccaggcaaaggcttgcgccgtgacctgggggaaatctataccatttactcgtcgaagaaccagtacccctgattaaccagaccggttaactcggcaacaaacgccgggttttgcagcgcgctacccagttcttttttgccaaccagggtgtaacggcatagggcatcggcggctttaggctcgacggtatccaggcgttcgctgttgataaagaagctgccgccaacctccagcacccttaagccactcaggcgagtcaggacggcaccgtccatcagcgcttcggcaacctcatcctgctcgtaaggcggttgcgctggggcaatatccaactcgtggcgcggcgtggtcacgaaacgaccaaaccactgtttaaaatcttccggctgattaatcatctcggtcatcatgctgcgcaggcgatcaagctcatattcttcaacccggccagggtgttcccggcaggttaaatcaggatcgctgtagtgctcgcccccgaggtcattttccagcgcatagtccgcaaagctgctgatgaggtccctgccgttagggccacggaagccaacggagtagttaagcgcggtttggtgggtaaagccgtcgtgcgggaagcccggcggaatatacaagatatcacccggctccagatcttcatcgataatcggctcgaaaggttccacgtgcagcagcgccggatgcgggcaaaactgcttcagcggcaatttgtcacccacgcgccagcggcggctccccatcccctgaatgatgaatacgtcgtactgatcgatatgtggccctacgccgccgccaggtaccgagaaggagatcatcagatcgtccaaccgccaatccggtaacacgcggaacggggtcaccaactccgctgacggggcatgccaatggttaaccgcctgggccagcagcgaccaaccggtttctcccaggttatcaaaatgctcgaacggcccgtggctagcctgccattggccattggtttggctgaccagacgactgtctacctcaacctccatcgccaggccggccaactcgtccggggtgatcggatcgacaaagttcgggaaggcattttttaacaccacaggttgtttttgccagtatttctctaaaaactcgggccagttaagattcagttgataagccatgggtccacaccagtgagaagacaaacgggcctgattataaagaggctgacaccggtggcgccttgtcattggtcaatgactgggcgttcaatcaggcgaaaatgatgcccctcaccccaacccttatg

SEQ ID NO: 207 - DNA, 231 bp, unknown
  Altogen  635822 strain
tccgggtcgaataacacgtctgttacgtcaagaagaggcatctttattcctcacgatgtaggtaatagcccgcagcaatccgcccgtgagataaagaggcttatcactcttacccttggcgcggcggctgcgccttgtggactcggcaagcggagaaagcttgtcaccagcctgaatgatcccttttgcgctgttggatgccacaatccccgcgcgccccagggatacctc

SEQ ID NO: 208 - DNA, 2681 bp, unknown
  Altogen  635822 strain
  misc_feature (426)..(555): n is a, c, g, or t
  misc_feature (673)..(778): n is a, c, g, or t
  misc_feature (812)..(892): n is a, c, g, or t
  misc_feature (937)..(1028): n is a, c, g, or t
  misc_feature (1055)..(1156): n is a, c, g, or t
  misc_feature (1847)..(1967): n is a, c, g, or t
  misc_feature (2031)..(2160): n is a, c, g, or t
  misc_feature (2508)..(2633): n is a, c, g, or t
gatgacaaactcagcctggccgaaagccaattgccgctggcgatccacggcaacagccagaacctggccgttggggctacggttactgtcaccttgaacggtaaaacctacaccggcaccacgctggcagacggttcctggagcatctccgtgcctgcggccgacttggcgttgctcgccgatggcaccaccaccgtaaccgtcaccgccaccgatctggccggtaacccggtcagcggcagccacgatctgggcgtatttatccatagcctgccaaccgccaccctgaacacaccgtttggcgacggcattctgaacagcacggaagcgggtcagccacagaccctcacaggttctaccggcatcaccacgccgggccagaccgtcaccgttactctgggaggtaaaacctacaccggcaccgtnnnnnnnnnnnnnnnnnnnnnnnnnnnnnnnnnnnnnnnnnnnnnnnnnnnnnnnnnnnnnnnnnnnnnnnnnnnnnnnnnnnnnnnnnnnnnnnnnnnnnnnnnnnnnnnnnnnnnnnnnnnnnnnnnnaaccctgaccgttaacgtggtagccggggatgatgtattgaatgccgccgaggtacaggtggcgcagaccgtgtccggcaccgcctcaatcgccgatgcaggccgcaccgtcaccctnnnnnnnnnnnnnnnnnnnnnnnnnnnnnnnnnnnnnnnnnnnnnnnnnnnnnnnnnnnnnnnnnnnnnnnnnnnnnnnnnnnnnnnnnnnnnnnnnnnnnnnnnncgccactctgaccgatgccgcgggcaacagcacnnnnnnnnnnnnnnnnnnnnnnnnnnnnnnnnnnnnnnnnnnnnnnnnnnnnnnnnnnnnnnnnnnnnnnnnnnnnnnnnnactacccatgtcctcggtgtggatgccaacccggccaacctgccnnnnnnnnnnnnnnnnnnnnnnnnnnnnnnnnnnnnnnnnnnnnnnnnnnnnnnnnnnnnnnnnnnnnnnnnnnnnnnnnnnnnnnnnnnnnaccggtaccaccacccatgtggaagcnnnnnnnnnnnnnnnnnnnnnnnnnnnnnnnnnnnnnnnnnnnnnnnnnnnnnnnnnnnnnnnnnnnnnnnnnnnnnnnnnnnnnnnnnnnnnnnnnnnnnnaaaaacctacaccgccaccgtcttggcaaatggtacctggagcaccagcgttccggccgccgatctggcactgttggccaacggccagcccaccatcaccgccaccgtcagcgacagtgccggtaacccggccagtgccagccatgacgtgaccgtcgacaccaacctcagtggactgtccatctccgtgatcgcaggggatgacaaattgaccctggcagaaagccaactgccactgacgatctccggcgacagcgccaatctgccgctcggtgccatcgttaccgtgacgctgaatggcaagatttacatcggcctgaccctcccagacggttcctggagcgttcaggtcccggctgccgatttggcactactggccgatggcaccaccaccgtcagcgtcagcgccgtcgatcagggcggcaacctggtcagcaacagccataatctgggcgtgtttatccacaatctgccggacgccaccctgaacacaccgtttggcgatggtatcctgaatggcacggaggcgggccagccgcagaccattagcggttccaccggaatcaccactccagggcaaaccgttacggtcactctgggcggtaaaacctacaccggcaccgtggatggctctggccactggagcgtcacgctgccaagtgcagacctgcaagcgttgccggacggcacnnnnnnnnnnnnnnnnnnnnnnnnnnnnnnnnnnnnnnnnnnnnnnnnnnnnnnnnnnnnnnnnnnnnnnnnnnnnnnnnnnnnnnnnnnnnnnnnnnnnnnnnnnnnnnnnnnnnnnnnncttggtggcgcagaccgtgtccggtaccgcctcgattggtgatgcaggccgcaccgtcaccctnnnnnnnnnnnnnnnnnnnnnnnnnnnnnnnnnnnnnnnnnnnnnnnnnnnnnnnnnnnnnnnnnnnnnnnnnnnnnnnnnnnnnnnnnnnnnnnnnnnnnnnnnnnnnnnnnnnnnnnnnnnnnnnnnnggcatcaacgtagatgccaacccggccaacctgccaaccgttagcatcggcatcttcgccggtaacgacattatcgatggcgcggaagtcaaaacggcccagacgatctctggcaccgccacccacgtggaggcgggccagaccgtcaccgtcaccctgaacggtaaaacctataccgctaccgtgctggccgatggttcctggagcaccagcgtaccggctgccgatctggcgctactggctaacggccagaccaccattaccgccaccgtgagcgacagcgccggtaacccggccaacgccagccatgaggtgaccgttgataccagcctgagcggcctgtcgatnnnnnnnnnnnnnnnnnnnnnnnnnnnnnnnnnnnnnnnnnnnnnnnnnnnnnnnnnnnnnnnnnnnnnnnnnnnnnnnnnnnnnnnnnnnnnnnnnnnnnnnnnnnnnnnnnnnnnnnnnnnnnncgggacctggagcgtcaccgtgcctgcggccgatctggccttgctggc

SEQ ID NO: 209 - DNA, 41440 bp, unknown
  Altogen  635822 strain
  misc_feature (2076)..(2117): n is a, c, g, or t
  misc_feature (6109)..(6168): n is a, c, g, or t
  misc_feature (6998)..(7100): n is a, c, g, or t
  misc_feature (9618)..(9618): n is a, c, g, or t
  misc_feature (30938)..(30938): n is a, c, g, or t
cccgcccagccgctgccaatgatggtgccgcagtccagcagatcgtaataggccgccgggctttccccatggaaggccatctccatcgcttcgcgggccgcccccaaggctaaccgggcaaagcgtggcaaacggcggcggatcgccgcaggcacccctttcaagtcaggttcgtcgtcgatcacccccaagaaacgcgactggatccccacggcagatttatcgtaatagcgataacccaagcggtaatccatcatcgccgcccagctttgctcggtattcatccctaatggcgtgaccgcaccaaaacctgtaactaccacgcgacgtggcaaagcctctctattcatgatctcatcctgttatatcaccgtctttttccacaccgccgcccaacgccaaccacagcttcatggtggcgttgaggtagttgtactgcagatctgacaaattgctttcgatggtcaataacgcatcctcggcatccagcaaggtctggagggaggctgcaccggcctgatactggctggtgggcagcgcccaacgctgctgaccgagccgcaggttgcgttgctgattgattttttgctgttgatagctgagccgttgcgacatcgcgttatccacgtcggccaacgcgttgtagacctggctgcggaaagtgatcgccgcctgcttgacgtccaaatcggctatttcgatggtcagttgcacggtattccagttcaggaagggtaaagcaacgctgctccccaaacttctgcttgggttgctgaaccactgctggaaaatcgtgctgcccgcattgagtgaagcactcagcgaaagcgtagggtagaagttcaaacgctccacatccgaccctgccaacgcagcacgcaggctcttttctgccgcctgcacatcaggccgacgagcaatgacttctaccggcaaagcgctcgctaccggcacttcctgagaaatatcaagggagcgtcgttcggcctgacgatcggtgggcgaacggttgaacaggatcgccagcgcattacggttctcttcccgctgctgttgcagcgtgcggtaggtgttctcacgattgatcagcgattgctgcgcctgttgcaggtcgagttgcccggcggcaccggcgtcataacgggattgcaccatcgccagcgtctgttggccaatttccagccctacctgctgttgcttgatttgctgattaaggctggcgatctgccaataatactgcgccgtgttgccgatcagcgtcagcgcggtattttgccgatcctgttccttggcctcagcctgccactgcgcctgctctctggttcgtgccaacttgccccacaaatccaattcatagcttagctccagcccactgctgtaggactctgtagagtcggtattctgatgcagattcttgctattactgaccctaccgcttgccgtcgcggttggcgtcaggttggtattcttcagcccggccgccagcctcgcctgctggagttgcagcccggcaatggccagatcgttgttgctggtcagcgcgcgcccgatcagcatcgagagctgcggatcctcgaagttatcccaccagtggtcagcgtgttgcagatagccagccccggtatcctgcactcgccactcggcgggcaccgacagcatcggccgctgatagtcacttttcgtcaaggcgccacagccgctcagcagcagaggcaacagtagtagaggaagtttgctcttcatcattcgcgcgccagcgcctccgttggatgcagtcgcgccgcgttgcgcgccgggaaaaaaccaaaccccagaccgattaacgccgagaacccacaggccagcaccaacggcggccaggtaaaaatcatggtgaattcctgcgtcaccggggagaaaataactcccgccagcccagagccaataatgccaatcaacccgcccagcgagcagatcaccatcgcctcaatcaggaactggcgcatgatgtccgcaggccgcgcaccgaccgaaaggcgtatgccgatctcatgggtacgttcggtgacagaaaccagcatgatgttcatcacgccnnnnnnnnnnnnnnnnnnnnnnnnnnnnnnnnnnnnnnnnnnacagcgtcatggaatccgaggctttacggatggctttggtcatctggtcattggtctgggtgaaaaagtcgcgccggccatgcgcctgttccaacagccgttcgacgcgcccctgcacttcgataagcgaggtcccttcgtgcacacgcagcataatcgactcgatcggcatatcgccggacatgcgctccagcaccgcggtataaggcatccaggcgcccagcatcatgccgctgtatttgccgcctttacgttcggcaacgccgatcactcggtaaggggtacccgcaagctggacgatcctgccctcagccacttcatccggctcaaacagcgtgtcgcgtaattgcggatcgataatcaccaccggctcacgctcatccagatcgcgccgggtaaagccgttaccggaaaggaaattcaggccctgcacacgaaaataggcgttactgataccggaaatcgaagccatcgcctctttgccaccgcgcaccgcggccacggttttactgaccaccggcgacacgctgtcgacataaggctggtgctccaacagctcaacgtcagccaccgtcagcgagcgggcgaggtctggacgcggtttatcccaccccagaccggggcgaacatctaaggtactgctacccaactggctaatttcattcagtatattttgacgtgcaccctcaccccccgccattgacgacaccacggaagagacgccgataatgatgcccaacatcgacaaaaaggcccttgcccggtgccccagtaacgcacgccaggccatcttgaccgcctcttgcacactcggccagaatgggttgcgtccggtagccgcggcaaccggcagcgcgggtttggtttcctgtagggctaccgcctcattacgctggtcggccacgatctcgccgtcgctgatttcgataatgcgctgcgcctgattggccacgtcccgatcgtgggtgacgataatgatggtatgccccgaccggtgcagcgagtgcaggatccccatcagctcctgaccactggcacggtcgagcgcaccagttggctcatcggccagaataatttccgccccgttcatcaacgcgcgggcaatactgacacgctgctgttgcccaccggagagctgcgccggtttgtaatccattcggtgctgcaatccaagccgggtgagcaggtattcggcccgcgtctggcgttctgccactggcatcgcggtatacagggcgggaatggcgacgttttcggcagcgctcagatagggcatcaggtgataacgctggaaaataaacccgatgtactggctgcgtagctgggccaactgatcgctgctggcaagctgggtagagatacccttgatctgcatcgtcccctgagtgggcttgtccaggcagccgatgatattcatcagcgtggattttcccgagccggaagcgccaacgatcgccaccatttcgccacgctgaatggagagagagatatttttcagcaccgccacggtctgcaacccggagacaaaatgccgggagatcccgctcaatgcgatcaagggagcggatggcttaaccattgctagcgctcccgatggcatgctgcgccaatactacgcggtcaccctctttcagcccctctttcacttcggcaaactggcggtcgttcaggccgatgcggatccagcgtgtttcaagctgtttgccgttcatcacctgcacctgataacgatctttaccctgttgctcaccgaaggcagccaccggcacgcgcagggcatttttcacctgttcggtgataataaagacctgagcggtcatcgaggtgcgcaacagacgtttgctgttggcaatggcaaacacgccgctgtaatacaccgccgaagcttgctgattggcagagcctgacgagttaccttcctgcaaggcttcgttcggggcttcctggatcgagcccatcacgctttcgtaacgctgtttgggatcggcaacaacgtagaaccacagcggttgcccgacgcgcaccttcaggatatcggtctccgaaatacgggtgcgtagcgtcatggtgtccacatccgccagcaccagaatggtcggcacggtttgtgacgatacgatggtctgcccttccttggtcacaatacccagcacttcgccatcgatcggcgctacgatgcgggtgaagcccagattggctttcgcggtttgctgctccatctgggcctgaacgatctgcgcatcgttgaccttcaactgggcaagctgagtttggaactgcgcctgcgccttctccagatcgcttttcacacctgaaccatcacgatccagcttcatctgacgcttcaattcctgctgatactgcttgagcgttgcctgggtgacctgtttctgcgcctgagcgctttgcaatgcagcctccgatttacgcaactcattctgttgtaaggtcggatcgatctccgccagcagttgccctcgggtgacgcgatcgccctgcttcacatacagcttttgcaattgtccgttaacctgcgcaccgacgctgacctgcagcgctggtttgaggataccggtggccaacacggttttctcgatatcgccacgggcgatctcttcgatgtcataggtattattgtgcgtaggcccaacgatgaaccaggcgatcgtgccgatcaacaccacctgacacagcaaggcaatcggcactagcctgcgtttatccatgccaaacattttcaacttcattaactcaccgccgtggttaacgctgctgacgcttcaagctccgtagcaacgctcaccacatggccgttgctcacgcggtacacccgatcgaacatcggcaatacgctttcgctgtgcgtcacggtgatcaacgttttatgctgctcgcggcaatgtgtcagcaaggtggtcatcacctggtgcgccgtgccctcatccaggttggccgtaggctcatcgagtaccagcactggacgatcgctgtacatagcccgcgccagcagcagacgttggcgctgccccagcgatagcccggcatgactctcacggatcagtgcattcaagccccccggcagtttttctatcaccgagctcaaattcagccctgcaagggagcgctcgatctgccgatgtttgcgctcatcgaacccctcatcaaacagagtgatattttgcagcaccgaggcattgaacaagatgtcctcctggctttgcaggaagaacaacgcgtgcacctgctgataatcgagcggctgcccatcaacaatcacctgcccctgttgcggtgtcatcaggcctgtcatcaccttcagcaaggtacttttccccgcacccgactcacccacaatagcaatacttttcccgggtttgagcgacagggaaaggtcgtgcaataccggctgctgggcgtcataggcaaaggcgatatttttataacgtaactgcgaagtgaatttagggatcggtgcaggtaccgcatcctccgccctatcctgttcaggccgtgatgggaacaagtccctggcgcgggtatcgatcacgtgcagctgattcttttgcaggacggagtagaaaatcttggtgatataagaggtgaagatttcacgcacaaaactgtaggcaaagaactcacccagcgtgatagtgccgtttttcagcaacggcaacgccagcaacataaagaacaccatctccagactgcctatcaactgatagaggctgcttttgacctgctcgtacatcttctgctgctggcgacaggtaaacagcgacatagcaaacttggcaaacatccccttgcgctggctgtccaaccctgcggacttgatggtggagaacccttgaatactctccaggataaagtcgctctgttcggcggtcttgacctgcaactgttgggtgtaaaaacggtcacgatagatagcccagacgctgaccaaccccatcagagtgacccccacaccagacaccatggccagcagcggnnnnnnnnnnnnnnnnnnnnnnnnnnnnnnnnnnnnnnnnnnnnnnnnnnnnnnnnnnnngcccccgacgccatctgccagttggaaaaacggctgaagacttcgcccggcgcgcgtttatcaaagaagttcaacgaattactgagcaggcgcgagaatcccgccacgctgttgatcaccacaaagcgtttgataaagcgctcggtgatccaacgcacgccgaaggccagcgtggtcgaaacgacaaatgccaacaggaagtagaagtaaggaaagtcggtttctcccgcgctggaaaaaacctggttgatagcgctgctgaccatcgtcggcataataaacagcgttaaagagatcagaaacgccagtatcatcagccggtaaatgccagggatacgcgcggtttctttcaggctcatggtgtcggacgcactgaagcgtttactgggctgaacattggccagcgcctgggggtcaggctgggcttcactgtccaataccaacgcataaccgctgatttccatttttaacgcatcaatcggcaacagttgctggccaatgcctgggttcatcacgcaaacatgattacctttacggtaggccagcaccacataatggctccccccctaatgtaaaatggcaggcagcggtatttccgccagttcaccgtgctcgaaggccacgggataggcgggcatcgccagttcagccataatgtcgcacagtgtggccagcgaggtgccatgctgcgaggcgggatagcgctcacgcaagctttccaatggcgcactgatgccctgcgtttccgccatcatggcgatgcaggccagcccacattcattcgtttcgccttgaaacaccagcgccgggattatcttttccatgatctnnnnnnnnnnnnnnnnnnnnnnnnnnnnnnnnnnnnnnnnnnnnnnnnnnnnnnnnnnnnnnnnnnnnnnnnnnnnnnnnnnnnnnnnnnnnnnnnnnnnnnntaatttccaggttattcattgataaaaaataacgaatgtgagtgccataacagccaatcttcagggtgcctgacgatcgacgtttcaatcagttccggcagtttggctttcaggttgcaggccggtatcggcggataaatgtggatttttattccctggtcgtaatacaggtaataagaaaccacctgcgcagacaaggctctggcgatacgaataatgccgctgtgcaggttggccgggcgatcaaacaggcgacaactgagcttcgccgttttcgcctcattggtattcacggtataatccggggagatgtcggggaaaatcatgatattgcgttgatgatcggccgccgccataatcgcgctagtcaaattaccggcaatcgcccggttatcatcatggatcgagcagtaagtcaggttaattcccgcttgctgtcgcgttctttcctgatagacctctgcactggcagaaaccaccaccgttgcctgccccggaaacaccccagcccccaccatgccagccaacacgtcagagaccatatgcagcggtgcaagcaccaccggttgccctgctcggtgcaagggctcgacgactgcgttgagctgtacctgacagtgttccaactgggccaggaggtgagcgttagcggcataggcagcggccagatccagcaagcgacgacgctggctgatcttggcaaaatccaccttacggccatcgtcaatcaggcattgcttattggctgcggccacaaaagcacgcctgcgctccccccggttattcaaccgcagccagcggctaagcgccgccagcccaagaaaccaacgataatcgccatgccgcagcaaccagcaaacggtcttgtcctgtgctctgcgcaacggcgaaaaactccgcgcgatttttgcgagggcatctctccatgccaggtaaacccacacggcaaagaaacgcattattgctccagcggtttatcatgctgcagcagcgacagcaggtgctcggcaaattccgggaaatcgcgatcctgcagagccagccacttcttgctgacgataaaggttggcgtcgcgttgattttgtagtgatcggacacgatggtcatatagctcagcaactctgcgacctgcggagtttgactggctgcgtgataagcagcgagatcgataccattctccatcaaccagctatcaagattttggggtttactcagatcgctttgctgtttgatgacggcgttataggcactttcacggtgctgaggttcaatacccatcaccgtcagggtggcaaataatggggcgaaacttgccaagccattgctctgcgcattattaagatgcagacggatcagttttgtacctgctggcatacgcgcttccagcttggcaatattctcttcgtttatggcacagtagtggcagccgtaagagaatatctcgacgatggtattaccctctttgatcgggctattcttgatctcgtcatcgctgacggcaaccagagcttgctgttcgatgccctgattcaatacaaaatagtggaaataggccgtcgtgatcaacgaggaaataacgataatcgccaaggtgtaaatgagaagcagcaggggttttttgaacataaaccgtacatcctaaaaaaggcacaccaatgagatcttataacggagggatagccatttttatttagcacgtagcgccgttggcaagccaaaagtcattacatccctgtccatcaataagcaccattttcaaacaggccgatgcaaaaatcctatcgcaccagcccaaacttatatcctgaaactcaggaagagcttacggtcggccagccgggcagttggcaggatcaacagaggagctagtctgactcacaattcggccattcttatccaggcaagttctgactacatagcaagcaccaccagcgccacccacatactcaacagcacagactcttttacatttaccaccaacaattgcacctgcatctaaggtattaacttttttcacagtatcgtcctttttataaaagtgaaacaaaaacagcccgagtaacatctatcatcagtgatagagtaatcctacgcttgatataaaggcacgattaaccatacctttattaaagcgcaagaaattaggtcaaactgaattatttcgttctttcaaaagagttatgacccaaggatagcccgacgtttaaatcagatcaataataatttttgtggcaattgacacattacaaaaaaatcataacgccgctaatacaggatgtttctcgttaaacaataagattgaatacaataaaaaatacgccactagatataccgtaaaaaaaataacaatagttaataaaggataattccctgagcgtaaaatcagccccgtttcaagaacgaaagatattaaagaaaatctaaacggtattacgaggcgataatcggaaggagaaagcggagcaacttgcaatgttgataacgcgaggcgtacggcaatgggctttttatcataangccaacacaataatgcggaaaatgattcagatcataaccaggaatcatcttaatccgtaccatcatcggcatcctgccaccgcgggtactcattatcttagccgggaaatcattagcgttgatagattaaccatagccaaaaaccgggccgacggcatcaactgaagataatttactcacattggcaaacggcatactaagcttgaagagtctacgagtggttgaaactgaaggaaacaatatgggttgcgcacgtccgctaggggggaaggggaatagcgccgggagtgcgtgaaatccgaagtggttgtgtcctacggtcacagtagcaagattaagttctcgctgcagcgagaacaaaggccggagctggcctagacgagcggtaagacgtgatgcatatggtcaacgagttaactcatcgctccccctaaaatccgatcctaagagattgcatcgtgaatataaaactggttgccgttgtgctttgcacactttttcttactgcctgtgacagagagacgccgaaagaacccgcaagcgtccgtccggtgaacatttttgaggttagcaacagtgcccagcaaggagtacgcatcttccctgccaggattatcgcaggtgaccgtaccgacctggccttcaagcgcccagggcaactgcagcaattgctggtgcgcgaaggggaacgagtcaaccaggggcaagtgattgccgaactaaacagcaatgacgcacggctacggttacgtgaccggcaagccacgttcgatctggcacaggctcaattcaatcgtttcgccaccctgagtgcccgcaatgttattccccgtgccgaactggacgttcatcgcgcagcgcgtgattcggcccaggccgccttgaagttggccagggaagaggtgagcgatatgcaaatccgtgccccctttaccggtgtgattgccacgctcactgcccgcaactatcaagtgatcccggcaggccaaccgatagcgaccttgaactcgctggattcgctggatgtagtattcagcatccctgaaaatctgttcattgtgattgatgaaaacaatgcacagtaccaacctattgttctgttgaacaacttaccgggccgcgagtttaccgcccgctataaagaacacaccaccaataccaccgcaggctcattgacttatcaaatgaccctgaccatgccgcgcccacaagatctgccaatgctctcggggatgagcggcagcgtgaaaatcaacctcggtaatctggccggggcttcgcagaaggccaatgtcattgtgcccgtcgaggcggtatttaacccggataacagcccacgcaatcaaccccacgtgtgggtgatcaaggaacgtgatggcaaactgtttgtggaatctcgtcaggttgaaaccgggcaactgaccgctaacggaatacagatcgtctccggtctggccgatggtgaacggatcgtcgccgccggtactcgcgaactgcgccccaatcaggaagtgcgcgcctgggtccgtgagcgaggtctgtaatgaaactgacagagaattttatcaacaacggcacccgaatctggctggcgatcctgctgctaggtattggcggtgtgctggcgtttctcaacatcggcaggctggaggatccggcctttaccatcaagactgcggtggtggtcacccgttatgacggcgcttcggcccagcaggtggaggaagaagtcaccctgccgctggaaaatgccattcagcaactgccttatattgataacgtcacctccatctccagcgtggggctgtcgcagatcaccataaatatccgtgctgaatacggtgccgccgaactgccacaaatctgggatgtgttgcgccggcgcattggcgatgccgcgatacggttaccgcccggtgccagccctccgatagtgaacgatgactttggcgatgtgtacggcttcttcttctcgctatatggcgacggctttagcaatcaggagctgcgcaactttgccgagctgctacgccgtgagttagtggtggtgccgggcgtgggtaaggtggggattgtcggggtgatcccggaagaggtgcagattgagatttcccgcgcccagatgaccgccgccaatattatcccacagcggctttacgatctgttgagccggcagaacgtggtatccaacgccggggatttgttggtgggcagcgagtcgatcaggctgcatcccaccggggaatttgccagcgtgcaagagttgggtaacctgctgattagcgagccgggtagcccgcgcagcgtttacctgcgcgacatcgccaccatcagccagggcgtaacccactcccccaataatatctaccgtgccaacgggcggcctgcgctctccatcggcgtatcctttgccccgaatgtgaacgtgattgtggtgggcgaggcggtcaaggcccggttggcccaactgcaagccgaacgccccgccgggatggatatcagcgttttctacgatcagtcccatgaagtagaaggcgcggtgaacggctttatcatgaacttcttgctggcgctgctgatcgtggtcggcaccctgctgatctttatgggggtgcgtagcgggctggtgatcgccgcctcgctggcgctgaacgtgcttggcaccctgctgatcatgaagctgttcaacattgagctgcagcgcgtttcgctcggggcgctggtgatcgccttaagtatgttggtagataacgccattgtgatcgtcgagggcgtgctggttgggcggcaacagggtgagaagaccctgcaggccattaataacgtggtcaaacgcaccatgttcccgttactgggggcgacggtgatcgccattctggcgtttgcaccgatcggcttatccaacgatgccaccggggaatactgtaagtcactgttccaggtgctgctgatctccctgatgctgagctggttcacagccttgaccctgacgccggtattcaccaaatgggcgtttgaaaaacagaaaatggccgagccaaaacccgatgagccggtcaaatcgccttatgatggttggctgttccgcgtctatcgcaatctattgggcaaactgctgcgccagcgcaccattacgttgggggtgctggccgcattgatggtcgtctcggtgatcggttttggcaacgtgcgccaaagcttcttcccgccgtccaatacgccgatcttcttcgtcgatctctggctgccctacggcaccgatatcgcctacaccgaaaagattgctgcccaaatcgaacagcatatccaggcgcaagacggtgtcagcgataccatggtcaccatcggccagggtgcgatgcgctttatgctcacctacaacgcgcagcggcaatattccaactatgcacagataatggtacgagccaagcagctcaaccagatccccggaatgatcggccaaatagagggctacgtacgcaacaattacccccaggtgaacgcccaggccaaacgcatcatgttcgggccttcgaataacagttccatcgaggcgcgctttatcgggccggatccgaacgtgctgcgaacgctggcggccaaggcagaaaccatcgccagcgccgaccccaatgccgacggcgttatgcacgactggcaacagcgcagcaaggtcattcgcccgcagttctcggattatcttggccgtgaattaggggtggataaacgcgaaatcgacagtgcgctgcgtatgagttttggcgggatcaccgtcggcctataccgtgatggaacccggttaatgccgattgtgttaagaacgccggattcggagcggttgaatgccgaacggttgaacgacgtgatgatctggagccaggcgcggcaggcatttattcctatcgacaacgtggtcaacggctttactaccgagtgggaagatccgctgatcatgcgccgggatcgcaaacgcaccctgacggttcaggccgatcctagctcccagagcggtgaaacctctgccgaactgttgcaacgcatcaaaccgggtatcgatgccatcccattaccgcgtggctatgaactgaattggggcggcgactatgaaagtaccaaggaagcccaggccgggttgttcaccagcctgccggtggcctttgtgatcatgttcatcatcaccgtgctgatgttcagctcgctgaaaaatgccgtcgcgatctggctgaccattccactggccttgattggggtaaccgtaggcttcctgctaaccggtattccgtttggctttatggcgctgattggcctgttgagtttaagcggcatgttgatccgtaacggcattgtattggtagaggagatcgggttacagcgacaggaaaaaccgatcctggaggccatcattgacgcttctacctcgcgtttgcgccctatcctgctgacggcctttaccaccgtactcggcctggccccactgcttagcgatgctttcttccagagcatggcggtggtgatcatgttcggcctgggcttcgctaccgtgctgacgttgttggtgctgccggtgatctacagctgtatgaactccgataagcaaaaggtcacaccgcaaaccgagagctaagacttaagtaagggcactgcataagcccggttgaatatttgtattcgatcgggctattgcaaacgcgggcattggtttactgtgtagccagttcaaaaccaaacacggagaagtgcaaagtgattaaagaaacaatcttgggatgttcgctgctgttggtctctgccacagcgttggccgggggttgtgacagcccgcgtaccccttatgacgtgacctactgcgcggcattggagatggtgcagttggatcaagagatcaatgtgcaatacaaaaaggtgatggggctactgactcagccgcaaaagcagacgctgaagcagtcgcagatcgaatggctgaaaaatcgggacagtcaatgtagcgacgactccatgatcaatgtcgcttgctcaaacaagaccatgcaaagccgtatcgattttctgaaaagcgtagagcgggaatgcaagagtaccggctgtgacagcaaaaaactggctcaacagcagtaataggatcggggcgccgacgctgcgccccgactaaaaaatcactatttggttaacgcgataatgcccaatgtcaggccagccaccgctgccgccccgcctgcaatcgcccctgcggtttcccagttatcctgggtggtgcctttcatacaggtattggtatgaaccagacggccttggtcatcatagaccggtacgcaaggcgactcggtagcacacccggacagtaaaacggccagcaggcccgctgcaataaacttactcatactcacacctcggcgttcaacagccaaaaaaacatcaaatgaatgaaaatcgcgccactgtaccaccgatgcctatagcgatggatccggaatagtcgcaaaatgtgtgagggtgaaacaattaagaccgccaggatcgctgtttctgcttgatcatctggattggctgaaatcgcttaagttaaggcttgcaggtattttttcgccgcatgtcatcgatcaacgcttctgcttgcgattttgacagcttaccgaatactttctgcatactctcacaggtgggtaactcacttgatgtattcgcagaggggggattatagaagctcacaatcccggcaccgagcaccatcaacacaggaatggcaaactgaaacagcttaagtttgctgtagggcaccttccaccgacgcgttgcgtcatagccctcaagggataccaagctgccataaggtatgaggcaggccgaggttcgttgcatgccgtaatctttttctgcccgctcccacagattagccgggatcaccaggaatctcagcgtatcgtcgatcgcaccttgaaagaataaccggaacacatagcggcttctcatcagcctttgcaatctttctaaatcgacgtcaaacatttcactgcccacttcggaacagttaaacaggtgctctcgccccgcaaagcgaacggttgctacttcataatcatcgtcaatctcgacggtcaaaacgtcaggccccaaatactccgccaagtattcaagaaatacgcccataccctccgtccaatccagcgcgatgtcaaacacgctgctgaaaacatcaagataatcatcctcaggaccacaaccactgagaatgtccgggtgacgcgcaataagcgatgcttgcacctggctcactttggtttgcttaggatcctcaaagagcgaactgaactcttcccaggttggcctattcattgggaaacctccttgtcgtttttccagctcctcactctatcagcacaatggccgagggagccaagcaaaatcagtacgctcgacttcaatctgggggatcaagacgatttattgtttatagccgaaatgttagcattaccgggcggcatatgatgctgctgcactacctctcgtattatcgcggctgctgaaccccgataacaccgatgaggcattaacatgactgacatacgtggccgggcctggcgcctggttaacaacaaacgcaacaaacaccgtgagatgggggattttcaacccaagttcactaaagagaagcggtggaaaatgctctacacccgctcacataaaataacgcgagcgagtcaattaggcatagagtatccgcagatatcccgcgccgtagcccggcgtaacgcactcgatgagatcgaataaccatgaatgtgctgtttgtctgcagccgtaatcaatggcgcagccctaccgcagaacgtatatggcaacggactcccggcctgaccgcaaggtcggccgggaccagccgtcatgccattaaaacggtgacgccggagttattgtgctgggcagatatgatttttgtcatggagcaaaaacacaaaaaccggctggtggccgagtatcgccgcctgttggaacacaagccgctgcacgttctcgatatacctgatgactaccaatatatggatcccgaacttatcactctactagagcaatctactgagccattcctgttgcctttcatcctgaaataatcttgtcccccgaaagcggtggatggcagtggttgctggttatgatattaatcatcgcgttcaccgtggtgatctttgatcgcatccctttctttaggaatagctttccagcgtatactttagttgcgtacagagctgattaagagccatcaggcgttgccatcaacgtgagcgctccgtagtatggaccagctgatttaaaggatagagaacttttaaggggtggtaaccatgcgttttttggctttgctttgtttttctctcctttcgtttgctgcactcccacagcccgcctcggccattgaaaatcccagtgcctttttagcacggatttatgccacctatagccatgatgaggttacagccgcattcatcggcgaaacaggcccgaagcggattgcctcaaagaaattcatcgctgtgttggcagaggatcaggcgctaaccttacctggcgatatgggctatcttgacgccgacccgatctgccagtgtcaggattatcagaacctggtggtgacggatatcaatattctctctaacgataataaaaaatcgcatgccacagtcacctttcgcgcttttagagatagcaacctcacgacaatcaccgagtttgatttagtagctgagaatgggcagtggtttattgacgatatttttgataccaatcagcagagtgttcgtcatgctattgatgccaataataaagccctgcgtataaagggggaaacattgccataatcgctagttgcctttgtcatttgagggctcactgcgaacgcctgacgctatcgtgccctgcgctttttcatcgcgccattgcttgcgcaaagaaaacattttctccagggcacgtcgtatggtggttatccagccagccggccggggatccgccaacatgcttaatgcacgagcatagtcaagtatcagccctggtgtccaggccatcgtttttgcacgtttacgtatttgtaccgccacccataattccggcgtcgtgagaattttactcaacacccaccagtggccacgttgcccccatattttactcactacgccttccagcgccgcttcaagaccccgtgccacactacttgagcagttacgataggtgagattataagtattgtcttcacgataaacttcccagaaccgtttcagacgttcagcatcgtagttcctgatccgcactcgctgggttgaagaacaccatgcacctgactcagtcacataatccggttggaatttccctttaacattattgtctgcggttgcccgcagcaagcgggtaaattgatctggcgaccggtcaatatcgactgcgggatacagactgatataaatgccttccggagattctagtgcagcatgaccagtagaaatcaccccatctttatccaccgcagcaatataacgatcaataacaggatgaggtaccgttgcactcttcgaggatcccacaggagtccagacatgtatggtcaatgcaggttcatcatcatccggaggaccttcccattcagttaccaaaggcgtagttattgcgctactggcttcctctgcggccttattacccaaaactgcggggttgacctccagctttttgacgcgcatcgccagcataaccatattccacccaccaaacatcaaccccagtcctaaacaataaggtacggtgccgacataatgggtcggatagggttgaaagaagaaaatagctaacataacttccaatacaccgccagccaccaccaacttccagtttttatagcgcacgaccccagcggagacgatttgcagtagcccatcggccaaaaacagagtgccaaaaatcatcgataaaataaaatggccatggtgttgcccactcaatatcaatattgcggccagtgaaaatgcacctccttttacgtaacgcaaggtacgttgcccgccgatgccggtatgcgcgaccatcaacgttgccagtccctctaccaacaacaggaaagcgaagggatgcaaagggaaataaatcgcgtcatccaacgcatcgatgaaaacgattaaacccgctaacacgcctaaccaaccggcaatcatcaatcctcgccagcggctacgcaaataatcaaccccaagtaaaatcattaccaaccgaaccatgccttatcccctctaattgtaaggcggcttgtcagatctacgcagaggtgctcttccaagatggcatgagtatagtttccacctctgaaatcacgcaatttgtgtcgtttcaaactgcataggtgcaactacaggcatttctgtacaaggtactgggttgattggggaaatgcgggttaaaccaagttgatatggaaaatgataaaaacgctgttaaatcagagagttgttgattttggtggagttcggggagacttgagattggagcgggtgaagggaatcgaaccctcgtatgcagcttgggaagctgccgttctaccattgaactacacccgcttaggtgtgcgactggcattataaccggttatgcgcgccgggcaagagaagaaagtgtataactgccgatgttttaagcggttagcaacaccctgctctcttcaggcgaaaaaaaaccggcacagtcgcctgcaccggtttaatcacttggtgagaattacttgctcgggcgcatggccgggaacaggatcacgtcgcggatggtgtggctgttggtcaacagcatcaccatacggtcgataccgatgcccagacccgcggttggcggcaggccgtgttccagcgcggtgacgtagtcttcgtcgtagaacatcgcttcgtcgtcaccagcatccttcgcgctaacctgatcggcaaaacgctgcgcctgatcttctgcgtcgttcagttccgagaagccgttaccgatctcacgcccaccgatgaagaattcgaaacggtcggtgatttccgggttttcgtcgttacggcgtgccaacggagaaacctctgccggatactcggtgatgaaggttggctggatcagatggctttccgcggtctcttcgaagatctcggtaaccacgcggcccaggccccagctcttctcaaccttgatgccgatcgactcggcaatcgctacggatttagccatatcgttcagatcgtccagattggtttccgggcgatatttcttgatagcttcgcgcatggtcaacttgtcaaacggcttgccgaagtcgaacacctcatcgccataaggcactttggtgtcacccagcacgtcctgcgccagcgtacggaacagcgactcagtcagttcgatcaggtctttgtaatccgcatacgccatatagagttccatcatggtgaactctgggttatgacgcggggaaacgccttcgttacggaagttacggttgatctcgaacacgcgctcgaagccacctaccaccaggcgcttcagatacagctctggcgcgatacgcaggtacatgtcgatgtccagcgcgttgtggtgagtaacgaacggacgagcagacgcgccgccagggatcacctgcatcatcggggtttcgacttccataaagcctcgacccaccatgaagttacggatcgccgccatcacctgggaacggatcttgaaggtgttacgggattcttcgttggcgatcagatccagataacgctggcgataacgggtttcctgatcggccaggccgtggaacttgtctggcagcggacgcagtgctttggtcagcagacgcagctcggtacagtggatagacagttcgccagttttggtcttgaacagcttaccgcgtgcgccaaggatatcgcccaggtcccatttcttgaactgctcgttgtaaacgccttcaggcagatcgtcgcgtgcgacgtagagctgaatgcggccacccacgtcctgcagcgtcacgaaggaggctttacccataatacggcgggtcatcatacggccagccacggtcacttcgatacccagtgactccagctcttcgttttctttgctgccgtattcggcatgcagcttgtcggaggtggaatcacgacggaagtcgttcgggaacgcaatgccgttctcgcgcagcgcggccagtttttcacggcgtgactgcagctcattgttgagatccaacgcctgttcggcgccttgtgcttgttgctcagacatttctgttcctcataacccggctttcaaacttgcctcaatgaatttatccaggtcgccatccagtacggcctgcgtattacgtgtttcgacgttggtgcgcaaatccttgatgcgggaatcatccagcacgtaagatcggatttggctgccccagccgatatcggacttgttgtcttccagcatttgcttgtcagcatttttcttttgcatctcgtattcatacagcttggcgcgcagctgtttgaatgcctgatccttgttcttatgctgagagcgatcgttctggcactgcaccacaatgttggttggcaagtgggtaatacgcaccgccgactcggttttgttaacgtgctgaccaccggcaccggaggcgcggtaaacgtcaatgcgcagatcggccgggttgatttcgatatcgatatcgtcatccacttccggatagataaatacggaactgaaggaggtatggcgacggccaccggagtcgaatgggctcttgcgtaccaggcgatgcacgccggtttcagtacgtaaccagccaaacgcgtagtcgccgataatcttgatggttgccgatttcaggcccgcgacgtcgccgtcggactcttcaatcacttccgttttaaaacctttggattccgcccaacgcaggtacatgcgcagcagcatgctggcccagtcctgtgcttcggtgccgccggaacctgcctggatatccaggtagcagtccgcgctatcatattcaccagagaacatacgacggaattctagttgttccagcttggcgctcagttgatcgagctcaaccacggtctcgttaaaggtgtcttcgtcttccgcctcgaccgccagttccagcaggccagtgacgtcttcacagccttgttccagctgatcgatggtttcaacaatggcttccagcgacgagcgctctttgcctaatgcctgtgcgcgttcaggttcgttccaaacgtccggctgttccagctcggcgttaacttcttctaagcgttctttcttggcatcatagtcaaagataccccctgagaacggctgtccgctcggacacatcctgaatgcggttttttaccggattaatttcaaacatgattttttgcgttcttacgttgatgtcgtcgatggcgaaatgccattggaaccggtaattctagcggatccagtcgccagtttatagcgagttggtcagtttttgtgggggattgagattagggcacccgcaggtgccctgataaaccggttaacgcggccagaggtgttgaattagcaactgcacattacggttgccacggaactcattcacgtccagcttatacgccagttccacttctttgatgctgctatccggccactgcgtggtatcgatgttgaaggcgatgccgtccagcaatgggccaccaccgagcggttcgatcatcagcttcaggtgtttttcgccccccagccgctgctgcaggatacggaacttgccgtcaaaggttggctcaggaaacgcctgcccccacggcccgccctcacgcagaagttctgcggtggtcagggtcagttcttgcatcatcagttcgccgtccgaccagatcacgccttccagcatggcgggatctagccattcgccgaccagttcgccaaaacgctggcgaaactcgtcaaacttggcctcctccaacgacaagcccgccgccatcgcatggccgccgaacttcatcatcagcccaggattcagggtatcgagccgctccagcgcatcacgcatatgcaacccggccaccgagcggccagagcctttcagaatgccgtcgcccgcaggggcaaaggcgatcaccgggcgatggaaacgctctttgatacgcgacgccagaatgcccaccacgccctgatgccactccgggtgatacatcgccaacccgtaaggcagttcagtggtcgtgcgttccagttgatcgcacagctccagcgcttccacctgcatcccctgctcaatctcacgccgggtctggttgagcgcatcgagatcgttggccagcatacgcgcctgggcaatatcgtcgctcaacagcatggctacgccgatcgacatatcgtccagccgccctgccgcgttcagccgtggcccaagggcaaagccgagatcgctggcggccaattgccgcgcatcgcggttggccacctccagcaaagcgcggatacctggccgacacttgccagcccggatgcggttcagcccctgatacaccagaatacggttgttggcatccagcggcaccacgtctgccaccgtgcccaatgccaccagatccagtaattcggccaaattaggcatagccagcacacgctgttcgaaccagccgctgtcacgcagcttggcccgcaacgccaacatcagatagaaggcaacgccaacaccagccagggatttggagggaaaatcgcagtcacgcaggttcgggttaacgatcgcctctgccgcaggcagcgtatcgcccggcagatggtgatcggtgaccagcacctgtattcccaagccgtgcgcaacgtctacacccgcatgagaagagatgccgttatcgaccgtaacgatcagctcggcaccccgagccgccgcctgttccaccacttcggggctcaggccatagccatcctcaaaacggttgggcaccagatattcgatggagctacagcccatgctacgcaaggccagcaccgtcagtgcggtactggtggcaccatctgcatcaaagtcgcccaccaccatgatgcgacggccatcggccagtgcctgctgcaatatcgctaccgcagcatcgataccgctcaactgttgccaaggcaacatgcccttgacgctacgctccagttcctgttcacccttaactccgcgcaacgcgtataagcgacgcaacagggggggcaggctggcgggtaaatggctggcatctgccgcctcgcggcggcgtaattgggttttaatactcaccgtaacttatttcgtggctgcggaggctgcatgcgcatccaacatcgcggccatctctttcggcccttggtagccagggacaaccatgccgtttttcaacacgatagccggagtaccgttgataccaaactgtacgcccagtgcataatgctggctgatatcggttttgcaggtcgccggagacactgcgtcgcccttcatggcggcatcaaaggctttagcacggtctgcggtacaccagatggaacgcatatctttctctgcctgagattctaggccctgacgcgggaacgccagatagcgcacggtgatccccagatcgttgtactctttcatctgctcgtgcagcttgtggcaatagccacaggtgatatcggtaaacacggtgatcacgtgtttctctttcgcggctttatagacgatcatctgatctttcagcgcttccagacgggtcatcaacagttgattagtcacgttgaccggctcaccgccgctgacgtcaaacagcggcccttgcagcacgtgtttgccatcttccgtcacatacagcgtgccgccttcggtcaatacggttttcaaaccagcgaccggcgagggttgcacgtctgcctgcttaatgcccaggctacctagtgctttctgaatggctgcatcgtcagcatgggccgcaccggtaaccgaagccaccagcagggagagcagcattaaaccttttttcattcttccaatcctttcgatccctgcgcgtcaggcgcgcgggtgatgctgttgatgtagctgtttcaatctttcagtggctacatgagtataaatttgtgtggttgagaggtcgctatgccccaataacatctgtacgacacgaagatcggccccatggttcagtaaatgggtggcgaaagcatggcgcagcacatgcggagacagccgttcgctgtcgatacccgctaggatcgcatagtgtttaatccgatgccagaacgtctggcgggtcatttgctggctgcggttgctgggaaacagcacatccagcgtctggccgttcagcatccagggcctgccgtgttccagataattttcgatccagtacaccgcttcttcgcccaacggcaccaggcgctctttgttgcctttaccgatcacccgcaccacgccctggcgcaggctgacatcgctgatggtcaaccccaccagttccgacacgcgcaagccggtggcatacaacacctcgagcatagccttgtcacgcagctccaacggttgatcgacgcaaggcgcctgtagcaaggcctcaacctgcgcttcgctcagatccttgggtaaccgctgcggtaatttgggcgaggccagcaacgcggtggggtcatccgcccgcattttttcacggttgagatattggaacaggcggcgcatcgcgcttaacaacctggctgagctggtcgctttgtatcctccctctacccgttcggcgagaaaggcctgtaagtccagagcttcggcctgtaaaaggctgcggttgttgagagccagccaaccggccaacgcctgtaaatcgagccgataagaggccagcgtattctctgccagattgcgttcgatccacaacgcatccaggaattgctcaatcagcgcactgtcttgctgttgcacgcggtcccctcttcattatcttcataccctatggatttcaagctgcagcttgaaagacgacgggtatatgccacaggcattatgccttaaggtatactcgttgcaattctacacacggcattataaacggtttaaatatgaagattggtctgttttacggctccagcacctgctacaccgagatggcggcagaaaaaatccgtgagattctgggtgaagacctggtcgacctgcacaacctgaaagacgtttctcccaagctgatggaagactattccatcctgatcctgggtattccaacctgggattttggtgagctgcaagaggattgggaagcgatctggccgcaactgactgaactagacctgaaaggcaagatcgtcgccatgtacgggatgggcgatcagttgggttatggcgaatggttcctggatgcgctggggatgttgcacgaccagcttgccccgcagggcgtgcagtttatcggtttctggccgattgacgggtttgaattcaccagccccaaaccgctcagcgccgacggcaaacactttgttggcctggcgctggatgaggtgaaccagtacgatctgagcgaagaacgcctgcaacagtggtgtgaacagatcctgctggaaatggaaccgctgctgtaacgaaatggggcgcgatatcgcgcccaacaaaatccttatttccacaacctgaaacggctctcgccattactggccggcgtctcagcggtttctggctcagcagcgttgcctttcaagcgagccgggtcggccacctgataccagtccagtttacgcgtcagcagcataatgcccgccagcaccccgaacagcagcaccgaacctaataccagtgcgttatcttccgactgcaacagcatatacagaatgccatacagcaggagcagactggcggcgaacagcatgccacggcgcatcccgcgcagcacggcgctgaggtagaaggcaatcagtccactacaggccacgcttgccagcaggtaggctacgtcgaatcccagatgttccgagaaagccagcaggatcaggtagaacagcaccagcgccgcccccaccaacagatactggatcgggtgtacccgcagcccggtcagggtttcgaacaggaagaacgccataaacgtcagccccaggaacagcaccgcatacttcaccgctcgctcggtcaattgatagtgatcgaccggttcgatcaggctggtcgtgaatgtcggcagcttttcctcttccataatgccgttgtcatacatgaaggcgctattaatgttgttggcaaaccaggtgctgcgccagcgggccgagaagcctttatcggtcaccttgcgctcatccggcaggaagttgccgaggaagttcgggtgcggccagttgctttgtaatagcagctcggaactgcgccctaccggcaccaaagacaagctgctggtccctgccaggttcagtgtgaaatccgccgtcagcccttctttctgcaacgaggccagggtcagcggtgcatggatcccctgagaaagcccgctgaccaaagtacccggctcaaacttggcctgctgttgaatgccgttgagggcagagatgcttttgataccacgagaatcgcttaatgacagcatcaggaagggttggccgaccgtaatgttgctatgctgcaaatcctccagatcgggttggccgaatttcacctggaaatccagtggcccctgatacacctgagtctggtagatacccaacttgcggatctcaacgttgggcctgccattcaccaccaaggattcgggcaagacaaagcgttgatagcggctggtctctatcttgatttcacctttttcgtttttcttctcttcgcgcaaggtgtacgggatcacgatcactagcccaagaatacgctgcgcccggctggtgctttcgctcacttgccccaccacgctctggcgatagccgctgcgttcctgtaccacatccatgagcatgcctaccgggatcatcatcaggatcatcaatcccagcagggtggttattttccaaaacagtaccgatttaaacatcgtggcagactccttgtaggtaatgtcgctacgataaagtcggcaagtgaaatcagaatgtggttatgtgaagagaaggtgaagtgcggacaatatgttgtaatcagaggggtaaagtgaggatggccttcgcgccggtgggttgcaggttttgcaagcggatggtgccacgatgcaggcgcgccacttcctgcacgaagttcaggcccaggccgctgctcttgggtttatcttcccgcgccagggaatagaagcgttcaaacaccttatccagcgcatagtcgggtatgccgctgccagtatcgcaaagggtgagctggtaatgatgctccaaccgctcgccatcaatactgaccgagccaccctccggggtgaaatccagggcattatccagcaggttgctcagcgcctgccccagtaaaaaagcatccccggtcagcgatgcttccgctaatgcccccaattcaatcgtgacaccacgctgcgccgcctgtgcttctttgcccgcgacaatctgccggactaacggcaccatcgctaccgtagccagttccaaaccgggccggctttctaactgcgcctgcaccaacagcttatcgaccaattgttgaatgcgggcgctctgctgttcgatgttggtcaaaaagcgttttgccgtcgccggaggcggtgattcctgcaatagttccgccgcgccacggatcgccgccagcgggcttttcaactcgtgagtcagggtatgcacatactgttcaatgtaggccttgccttccagcttcatacgcatgctttcaagcgattgcgccagttgggtaagttcaacgctgcccatgcgtggtaacggcaccgcctcgccgtgcgccactccgtcggcataactcaccaggcggttgatcgagcggttaatccaccagacgaagcccagcccgatcgccagcgcaatccccagcagcaccgcgcccgccagcaaaatacgcctctcgctgcggcggatcaccggtgccatggtgctgttgggcttgccgacgctcaacacgccgataatctgcccttgctccaccaccggtgcggccacgtacattaccgaactgctctcgtcatcagcaatcgtccgggtactacgcgcaccgtattggccacgtaatgtcagataaacatcgttccagcgggagtaatcctgccccagcgcctgacctgatgaatcgaaaatcaccttgccgcgcccatcggtaagataaacgcgatattcgttacgatctttacggatcccggcaatattggccccgatcggccgctgatttagttgggcgatagcctgtgccaactgaccttttgccgcatccccatgtctcatatccagccgcgccacctgtgccagcaagttggcggtatccaccagcgtgccttcagtggcacgccgtacgccaggtttgacctcctgcacgaaaatgctcagtacaaaataccccccccccgccacaatcaggaaatagcccaacagcaggcgcaggccaatcctcatggcaggcggctcacgctatagcctaagccacgatgggtatggattgggggttctgcggcatcgatcgcccgcaatttggcacgcagcgttttgatatgggtatcaacggtacgatccaggctctcttccgcctgggcccaaacgatgtccatcaactgctggcgggaaaacacccggccaggcgcttgcaacagggttttcagcaacaagaattcatagcgggtcagcggcaacggctgctggtgggagcagatcgtggccccctcttcatccaggctgaaggcaccaaaatgataaagggcaggctgttgcaagcgctgctgcttgtgtaaacgccgtaggatcgtgcgcacacgagcgctgacctcacgcggggaaaagggtttggcgacatagtcatcggcaccgatttccagcccgatcaggcgatcgagttcaccgctgcgcgcggtaagaaacaggatcggtaaatcccccgcctgcgccagcagccgacggcaaagctcaaaaccgttgatatcaggcaggccgacgtcgaggatcaccaatgccggtaaaccctgtggcaaagcctgcaaagcaggctcgccacgatcaaaccaacgcacctgaaagccttcgctctccagggtataaatcagcgtatccgcaatgctgggctcgtcttctaccagccaaagcagcggtttcattatacgtcctcgtcggtagcggattgttcaaacaacaaccgctgacgcagttggcgccaatccgctttgctcatggaatccgaagccaaccacagccgatggcgttttttgccgttggcctgctgaagcgacagtaaaataccgaaccctggcatccagggcttgttcaccatcagccattcctggccatgccactcaatccggcgttcagccagcaaacgcagttctccctgcctggatgcaatgcgcttttggctgcgaatgcattcaaacaccaccaacgtcaacagcactaaccagatcgggccatagccttccggccaaggggcgatcaggatcagcaaaatcagcaggccgtgagtcagcaacgagactaactgggtacgccaggaaacgcggacatcacatcgccactgggccacgggctttatttcgcgtttggatcagggacaccattctctgcagatcttgatcctgcggagcgccatgattcatcagccagttgaacaaatcggggtcgtcacattcgagcaagcggatgaatacgaccttgtctgcatcactcagcgtatcgtattcatgttcgaaaaacggcatgatcgagatatccaactcgcgcatgccacggcggcaggcccagtgaatacgtgctttattattaatatccatgttgttatgactaacctcttttcggcatggcttgccatgctcttgggcaaccgacacttggtatggcaacgcgcgcgcaatttaattccgtcagccaacgatttgggtgcaattgggtctcgttggccgtaagcgcctagagtaacaatttgacatactcgccgggaagggcgtttacccaacaaaacgtaaaatgtcaaaaaaagcgctgcctggtaataactgcttgcaaagccagccacctcttttaccatggtagcaaccccaacaggtatgctaaacatgcagcaggaaccgattatggcgttcaatattccttttccaccccgtcaaccttccgcctcctcccatctgccactgacgctgatctcactggaagattgggccatggtgcagttgagcgggccagacacggtaaaatatcttcagggccaggtaacggctgatatnggggccagacacggtaaaatatctgcagggccaggtaacggctgatatcgacaaactggcggccgatcaacacgtgctgtgcggccattgcgatgccaaaggcaaaatgtggagcaacctgcgtttattccaccgtggtgaaggctttgcctatcttgagcgccgcagcgtgctggaaagccaactggcggaaataaagaaatacgcggtgttctccaaaatcaccatcgcggcagacagcaatgcagtgctactgggcctcgctggccttgaggcgcgggccgcattagcgaaagtgtttagcaccctgccagatgcagaacatcaagtggtgcaagacggtgataccactttgctgcactttgcgctgccagcagaacgttttgtgctgattaccacggcagaatccgccgctctgctagcttccaagctggaaggacaggctgagctgaacgacagccgccaatggctggcactggatatcgaggccggttacccggtgattgatgcagcaaacagtgcgcagttgatccctcaggcgaccaatctacaggcgctggacgggatcagcttcagtaaaggctgctataccgggcaggaaatggtggcccgcgccaagttccggggagccaacaagcgtgccctgtactggctggaaggtaaaggcagccaggtacctcaggcgggtgacgatctggagttgaagctgggtgaaaactggcgccgtaccggcaccgtgctggcggcaagcttgctggctgacggaacactgtgggtgcaggtggtgatgaataacgatctggaagcggacagtgtgctgcgcgtacgcgatgatgccagcagtcagctcgccatcaagcctctgccttactcactggcggaagaaaagtaagtggtttggccgcaggcatcgcgcctgcggccagatgagttattcgtccaattccctatcacgcggcaccagataaatcagcaccagcaaaatagtgacaaagaagcggaaggcatcgggcaccccgttccactgttttgacatccacatgccaaaccactcaccgccaaccgacataaaggcaacctgccaggtgaggaaacctaacgtcaaccctgcgatggcaaaagtcttggcccggttaaagctggccgctggcaatttcaggccgcacagcaggcgaattcccccaatccaacacaaaatagcggtaagggtttccaacgcaataatgccgatatatcccacctgatgcagccatggcgactgaatggaacgataggtgatagtggcatcagggaagatcgtatccatcataaaaacatggcgtacgaaagcgaagttggtgtcgtaatcggtgatattgccaaaggccaccagtgaggcaaatagcgcgatagcgcaaaccagcagggctttggataaacgaacgatcatagtgaagagtcctgggtaatgattaaaggcaccggaaggtgcaaataccccatagatctcaagatgcaggtcagccagcagcaagcgcagccaaccccctgcgacttgaaagcgaggggtttggcgggctcagaaataacgctaaggcttgctggatacccgaaagaaacaagcgcctctttttaacccaaaagaaacgctttggcaatatatcgacaacagatgggcaggttatacgtaaaggtagatcgccatgaagtggcacacactgccgccgagcacaaaaccgtgccagatcgcatggccaaaacggaagcgtttcgaggcgtagaaaatcacccctagcgtatacaccacgccccccaccgccagtaaagtgactccaccgacgtccaggcgcattgccaactggtaaatcacgatcagtgacaaccagcccatggttagataggtcaccaacgacagcacctcaaagcggtgcgcaaatgccagtttgaaaatcacgccgaacagcgccagcccccagatcaccaccatcagccctcgcgccaacggtgagtccagccccaccagcaggaacggcgtataggttccggcgatcagcaggtagatggcgcagtggtcaaattttttcagccagtgcttggctccctgatgtggaatagcatgatacagcgtagaagccaggtacagcaggatcatactgccgccatacaggctataactggtgatggccgttaccccagcgccgtcgtttaccgcctgaaccaacagcagcaccaggccgacaatcccaaacaccaagccaataccgtggctgatgctgttggcaatttcctctgcccatggataagccgtggcgggcaactggtctgccccgactttcacttcgtcctttttccccataacgcgcaacccctcaaaacaacgcatattgtgcgaattaactgcaaatgagattaactgagaacgattccagtgtacacgtgtacgctaaaataaaactgtgtacgcttgtaacaccaagcgaacatcgaaatcctcagcctgctgggctacaatcgatatgctttgcaccctatggatttcagttacggctgaatacggcgggtatcccatcattcacctcgaggttcgtaccatgtcatccgctgtacccgcgttagactttggctccatgactcaaaccatccagtttctgatggaaatcgacaaacttaaaagcgtgcaacgccgtaccaaggtgatgggcacccagcgtcaggaaaactcggccgagcacagttggcactttgccattgcagccttgagcctggccccttatgccagcgatgaagtgaatattcagcgcgtgatccagatggctctgctgcacgatatcgtcgagatcgatgccggtgacgttatggtttacgatctggcggcacgggcggcgatccacgatcaggaagtggcggcagcaaaacggctgttcgggatgctaccggaacctcaacgtggcgttttcaccgatctgtggcaggaatatgaagcaggcgaaagcgccgatgcccgctttgcgctggtgctggatcgctgcatgccaatgctgatgaacctgcacaacggcggtcagagctggggagagaatgatatcagcctgcagcaggtattggaccgtaatacgatgattgccgatatccatcccgagctgtggcactatttggagcagcatttgcgggatgcacagcgtaaaggctggctgaagtaatgcccctcaccctaaccctctcccacagggagaggggaccgatcgagttcgctgatttctctgcgtaatacccaatcttcttactgctcacttcccgcagctgcaagggccaaccaagcactccgaccaactccctctccctgtgggagagggtcggggtgagggaacaccgcgattgccgtacttaacgccctccagcggcttcgataaaactgccggtgacgtaggacgccgcatcggaaagcagccaggcaacagcttgcgccacttcctctggttgaccaccccgctgcattggcaacgcagacttcacacgatctacccgccccggctctcctccgctggcatgcatctcggtgtaaatacaacccggcctaacacagttgacgcgtatcccctgtgccgccacttccaacgccagaccggtagtcaacgtatccaccgccccttttgacgccgcatagtcaatatattcccacggagccccaagtcgcgacgcagcggaagacacgttgacgatcgatccgccctgcccaccatgccgtagcgccatacgctttaccgcttcgcggcagcagagaaaatacccggtgacgttagtcgtcagcaccttattgatccgctcggcggtgagttgctcaatgctcgcctgttggaacaaaatgcctgcgttattgaccagagcactgattggccccaacgtggcttccagttcggcaaacatcgccaccacctctgcttcctcggcgatatctgcctgcagagccagtgccttgccaccctgttggcggatctgcgccaccactaactcagcagcagcactatcacgcagataattgacacccaccgcatagccctgctgagctagcaataacgccgtcgcacggcctatgccccggctggcaccggtcactaacactacttttgtcattacggttccttgctgttgagatcagaaataatagcgggtactcacgaggacaagccagacaacttgctgctcaaagataggttaatcagtgaacagcaatcgctgcggtgctgcaataaaaaagggacacggcatcatgcagtgtccctcgatcatcgttttggcagatggtgttattcgtagtcgctcatcggtacgcaagagcagaacaggttacgatcgccgtagacatcatccaggcgtttcacgctcggccagtatttattctcacgtacgccagctatcgggaataccgccagctcgcggctgtaagcatgctgccagtcgctgaccagttccgcctgcacgtgcggtgcgttaaccaatgggttgtcttccagtggccattcgccttgctgcacgcggtcaatctcactgcggatagccagcatcgcatcgataaagcgatccagttccaccttgttttccgactcggtcggttcaaccatcagcgtgcctgccaccgggaatgacatggttggcgcatggaaaccatagtcgatcaggcgtttggcgatatccatctcgctaatgccggtctcttctttcagcggacgaatatccagaatacattcgtgcgccacgcggtgatcgcggccggtatacagcaccgggtaagcatctttcaggcgggttgcgatgtagttggcattcaggattgccacctggctggcctgcttcagcccttccgcgcccatcatgcggatatacatccagctgatcggcaagatagaggcgctgccgaacggtgcggcagaaaccgcgccctgctgggtggtaacgccatcaatctgcaccacgctgtggcctggtacgaaaggtgccaaatgagacttcacgccgataggtcccatgcctgggccgccaccgccgtgagggatacagaaggttttatgcaggttgaggtgcgatacgtccgcgccgatatagcccggcgtggtgatccccacctgcgcgttcatgttggctccatccaggtaaacctggccgccaaactgatgcacgatctggcacacttcgcggatggtttcttcatacacgccgtgggttgacgggtaggtcaccatgatgcacgacagggcctccccggcctgctcggctttcacccgcagatcgtgcagatcgatgttgccgttcttgtcacaggccacgaccaccacgcccatgcccgccatctgggcagaagcagggttggtaccgtgcgccgagcttgggatcaggcagatattacgccctgcctcattgcggctttcatggtagcggcggatcgccagcaaaccggcatattcgccctgtgcgcccgagttaggctgcatgcacaccgcatcgtaaccggtcagttgcaccaaccattgggaaagctgcccaatcatcacttgataacctgcggcctgctccggcggacagaacgggtgaagttcagagaattcaggccaggtgatcgggatcatttccgcagcggcgttcagcttcatggtgcaggagcccagcgggatcatcgcctggttcaacgccagatctttacgctcaagacggtgcatataacgcatcatctcggtttcgctgtgatagcggttaaacaccggatgcgtgaggatcggatctttacgcagcattgccgccgggatcgactggctgtttttgctcacggcggcatccagcgcatcgatatccaaaccgtggttatcgccgaccaacagggcaaacagcgtctgcacatcttcacgggaagtcgcttcatccagcgtgatgccgactgccccgtggatatcggtacgcaggttgatgccaaagcccagcgcacgttccagcaccgccgccttgtctttcacttccacggtcagcgtgtcgaaccaggtttgatggcgcagtgtcaggcccgcttgttgcaggccagcggccagaatatcggtcaggcgatggatacgcccggcgatacgttgcaggccttgtggaccatggtacaccgcatacaggctggcgatattggccagcagcacctgcgaggtacagatattcgagttggccttttcgcggcggatatgttgctcacgggtttgcatcgccatgcgtagcgcggtattgccggcagcatcgcgggacaccccgataatacggccaggcatcgagcgtttgaattcgtcacggcaggcgaagaacgctgcgtgtgggccaccgtagcccattggtacgccaaagcgttgcgcagaaccgaataccacgtcggccccttgcttgcccggtgccgtcagcagcaccagcgccatgatatcggctgccacgctggtgatgattttgcgtgttttcagctctgccagcagggcactgtaatcgtgcagttcaccagtagtgccaacctgttgcagcagtacgccaaacaccccttgcagctccaacaccttggccggtttgtcgacgatcacgtcaaagccaaaggtttcggcacgggtacgcaccacgtccagcgtttgtgggtgcacatcatcagccacaaagaagcggttggcgtctttcagtttgctggctcgtttggccaacgccatcgcttctgcggctgcggtagcttcatccagcaaggaagcagaagccagatccaacccggtcagatcgagagtcagcgtctggaagttgagcaacgcctcaagacggccttgtgacacttccggctgataaggggtataagcggtataccagcctgggttttccagcatgttgcgcaggatcaccggcggcgtcagcaccgcgctgtaacccataccgatataggatttgtagcgctgattctgtgaggcaatcgccttcagttcggccagcgcctgatgttccgtggccgcatcgcctaccggcggaggccctggcagttggatatcggctggcacaatctgttggatcagcgcgctgagcgagcgagcgcccacggcttccagcatctgctgctgttgctctgcggaagagccgatgtggcgctcgatgaacgcttcgctgtgttcaagttggctgagtgtctgagtcattgctacaaattcctgaatgcttgcggggtacgggatatagcctgaactgcaaaacgccccacaggtaggtggggcgtgatagtgattattcgtcgatggaggcctggtaagcacccgcatctagcagcttgtctagctctgccgcatcggatgccttgatgcggaacagccaaccttcgccgtatggctcgctgttgaccagctccggggagctttccagttcgccgttaaccgcgatgatctcaccgctgattggcgcgtaaatatcggaagcggccttgaccgactccgcaacggcacagtcatcgcccgcagaaaccgtggtgccgacttccggcagatcgacaaagaccatatcgcccagcagttcctgcgcgtgttcggtgataccgacaacatattcaccgttgcctgcgtcacgcacccactcatgggaggtggcgtatttcaattctgttggcacattgctcattggcctgctactccttcgaagaataaaaactaattgatcagtgacttaccggcacgtacaaaacctggcttacagactttaactggcatttcacggttacggatctgtacgatagcctgctcaccgataccggccggaacccttgccaacgcaatgctgaagcccaaggttggcgagaaagaaccgctggtgatcaccccaacctggggttgaccgttcgcatcggtgaaatgcaccggcagctcattacgtaatacgcctttttccgtcatgatcaagccgaccagttgttcggtgccattttcacgctgctgttccaacgcttcacggccgataaactgacgatcctgcggttcccaggcaacggtccagcccatattggcagccagtggcgaaacgccttcgtccatttcctggccgtagaggttcataccggcttccaggcgcagggtgtcgcgggcacccagcccggcaggtttgaccccagcggccagcagtttctgccagaaatccaccacctgctcttttggcagggcaatttcatagcccgcttcgccggtatagccggtggtagcaataaacaggtcacccgcctgcacgccgaagaacggcttcatgccttccacagcctgcttctgttctggagtaaataaggtggcggcgcgctctttggcctgtgggccttgcaccgcaaccagcgccagatcgtcacgcaccgtcagctcaacgttgtacggagccgcatgctgttcgatccaggccagatccttttcgcgggtggcggagttcaccaccaggcggaaatagtcttcggtaaagaaatagacgatcagatcgtcgatcacgccgccggacgcattcagcatgccggtatacagcgctttacccgattgagtgagtttggcgacatcgttcgccagcaggtaacgcaggaattcacgggtacgagcaccgcgcagatccacgatggtcatatgggagacatcgaacatgccggcatcctgacgcacggcgtggtgttcatcaatctgggagccatagtgcagcggcatcatccagccatgaaaatcaaccatgcgcgcaccgcacgccacgtgctggtcgtacagtggggtttgctttgccatcttttccctctttccactcaagtagccgaagacagggtgttattacgcaataaggcgggtgtagctcgcggacctgattgcgcgaaacacgctggctgctcaacacaaattgcctcgccaatggttaacgacgcaaacgatacctttgccctgacgttaacaccgaacgcccctattaaccataagttaaaataggttcgaccgggttcagggtcggtaaaatgccgcgttagtttgcagagtttttcactggaaaaatgcgctttgaggcacaaaattaacaattaaagcggcaaaaatccgaagttatataacaaacaggagctgggatagagaatttcggtttttgataaccgaccatggaattagaaaaagtaatgagaaattctgcctgaaattagaatttctcaaacgaagggagctataagggaaatcgatgacgggtaaacatgcagaatagcgggcgcggtatgtggcgccccatagtgaggtttgtcagctccaagctgactaggcgagccagtccggcagatcgttaagccccatggcctgccgcaccagtttcggcttcacgcccggcagactgtcggccagccttaagcccacgtcgcgcagcagcttcttcgccgggttatggcctgcaaacagttcgcggaacccttgcatactcgccagcatcactgcggcaccgtgcttgcggcggcgttcataacggcgcagatacagatgctggccgatatccttgccctgacgttgcaggcgtttcagctcggatatcagctcggcggcgtccataaagcccaggtttaccccctgtccggccagtggatgcacggtatgtgccgcatcccccaccagtgccagacgatgggcggcaaagctgcgagcgtatcgcccggtaagcgggaaggtcagccgctcgctttcaagcttgcagttgcccagacgcatatcgaaggtcattgccagctcgcggttaaaggcttccggttccagttgttgcagcctttcagcttcttctggcgcaaccgaccagacgatagaactcaaatgcggatcgctaaacggcaggaaggccaggatcccttcgccatgaaacacctggcgggccgtagccaaatggggctcttcggtgcgaatagtggccaccagcgcgctgtggcggtagtcccagaaggtcaacggaatatcggcgtgctgacgcagccaggaattggctccatcggcaccgatcaccagccgggcggttaacatacggccatcttccagcgtgacaaaggcgtcgttttccccccatgccacctgtttcagcgcagccggggcgagcagcgtcacatcggccaaggtggccgccttgtgccacagcgcctgctggatcacctcgttttctatgatatggccgagatggctgaaaccacattcgtcgccgcgaaacgcgatcttgccgaagctgtcacgatcccagacttccatcgcgttatacgggctggcgcgcaggttgcggatctcatcccacacgccaatgctttgcagcaagcgctcgctggcagcgttaatggcagatacgcgcaacgctggctgttcttgcagcggtgataaatctggctgccgatgttccagcaccgctatgcgcaggccactgccctgcaaaccgcaggccagtgccaatcccaccataccgccaccggcgataatcacatcaaatgattgcatgctgcttgagttccttaaatttgcccc

SEQ ID NO: 210 - DNA, 869 bp, unknown
  Altogen  635822 strain
  misc_feature (229)..(305): n is a, c, g, or t
aagccataagaaaatgcgggataagttcgtgtactggagcaggccgccaacgctggatggcatgaccgggcatgcgggatgcctccctaactgccaatgctggccggaggttgatattcccggcccaagaaaatgactggtcgccttggcggcctttttttatgcccgcaggtaacccatgaaatatttctttaagacccggctgggtaatacccgcttccagttggcnnnnnnnnnnnnnnnnnnnnnnnnnnnnnnnnnnnnnnnnnnnnnnnnnnnnnnnnnnnnnnnnnnnnnnnnnnnnngctaatagttgtccgtcgaacgcctgaagaggtattcagcgagcgcacgatcgcatcattcgaaggaatggccgtcactattggtcatccgaaggacttcagcggaaacattatttttgtcacgccgcagaactggcggcagttagcaaatggccacatccagaacgtcaggcgcggagaaggagcgaattccgatctgctactggctgacgtcatcgctaaaacgcctgaggccatccaggcggttgaggacggcgacgacgaagtaagttgcggctatgacgctgactatcgccaaatctcgccgggtgtcgcggagcagtatgcgatcaccggcaatcatctggcctttgtccctaacgggcgggctggttcacgttgtgcattgggagacgctatgccgagcactgctaaaaactggtttacccggcttttaaaggcccgcaaaaccaacgacgccgccgaaatggcgaatcttattgataacccgccggaaaatatgaccggtgataacgatgacgtgacaaccgctatgacaccaggcggcgtggtcatcaatctttc

SEQ ID NO: 211 - DNA, 226 bp, unknown
  Altogen  635822 strain
tccgggtcgaataacacgtctgtcacgtcaagaaatggcatctttattcctcactatgtaggttatggcccgcagcagtccgcccgtgagataaagaggcttatcactcttacccttggagaggcggctgcgcctggtggactcggccagcggagaaagcttgtcacccgcctggatgatccctttggcgctgttagaggccataattcccgcgcgccccagggat

SEQ ID NO: 212 - DNA, 179001 bp, unknown
  Altogen  635822 strain
  misc_feature (12649)..(12747): n is a, c, g, or t
  misc_feature (23246)..(23253): n is a, c, g, or t
  misc_feature (23279)..(23279): n is a, c, g, or t
  misc_feature (50714)..(50723): n is a, c, g, or t
  misc_feature (107926)..(107930): n is a, c, g, or t
  misc_feature (178558)..(178619): n is a, c, g, or t
  misc_feature (178762)..(178815): n is a, c, g, or t
ggggacttagcgaactttcagcggatcttcattggctaaacgctggtcttctgcctgacaggccgctgcggtaaacagcacgtcggtggaggagttgagcgcggtttctgccgagtcctgcagtacgccgatgataaagccaacggcaacgacctgcatcgcaatttcgttaggaatgccgaacatgttgcaagccagcgggatcaacagcagtgaaccaccggctacgccggaagccccacaggcgcaaatcgcagccaccacgctcaacagcagtgcagtcggcacatccaccggaatgcccagcgtatgaaccgcagccagcgtcagcacggtgatggtgattgcagcaccggccatgttgatggtcgcccctaacgggatggaaaccgaataggtatcttcgttcagattcagctttctgctcagctccatattcaccggaatgttggctgcggagctgcgggtaaagaaggcggtaacaccgctttcgcgcaggcaggtgaacaccagtggataaggattgcggcggatcttccagtaaacgatcagcgggttcagcaccagcgctaccagcagcatacagcctatcagcacgaacagcagttgggcatagccccacagcgcgctaaagccggtatcggccagggttgacgccaccaggccaaagatccccagcggtgcacagcggatcaccgcacgaaccaccatggtcacggcatgggacatgtcggtgattagcgatttggtagtatcagaggcatgacgcagtgccagccccaaccccacggcccaggccaggatgccgatatagttggcgttgatcagcgcatggaatgggttcgccaccacgctcatcagcaagcctttgagcacttcaacgatgccacccggcgggttgatgtcggtggtgcccacggccagcgccaacgtggaagggaaaataaagctgaccaatacggcagtaagtgcggcagcaaaggtgcctaacaggtaaaggaacaggatggggcggatgttggttttctggccctgcttatggttggcgatggaagccatgaccaagatcaacaccagcagcggtgccaccgccttcagcgcgccaacgaacagcgagccgagcaggccaactgctgtggcggcggctggcgaaaccagtgccaccacaatgcccgctaccaggccgatcaatatttgcttaaccaggctgccctgagtgatgcgtagtaatagtttattcatgatgctcttgcgtttccgctccctgagaatgtgatgtacagattgctgcgcctcggctgaaacgtggccgggcaacttatcgtcatatctgtaactaagtatgtttgctatgccagtattcagtaaacgggggatcttgaaaaggggagaagatgaaattacctgcatggatcaatgattgataacatgctgtttacatttgtgtgatcgtcataacatttggcgtttatggctatttgccaaataatcgcggggcgtctagcgccccggataacagattatggtagccaaccttaaccgactccggccaatggctgctgggccccaaggctggcgacaaagtcttgcagtaactgctggctgaatggcgtatcgctaacctgttgttgtttaagctgataaattttctgcttggccggttccaactcgctgagccagctcaggtagcgctgcatgatcgccccgttaaattccgggtggaactgggtggtcaggacgttatcgccgtaacgcaggatttggcaggcgtcctgttgcgagcgagcaagcacttcagcccctggcggcggcgttaatacgctttgcgcatggatcaggttcacgttgaagcgcgcaggcaggggagccatacgcttatctgagcgggcagcgggtaataactcgatctcgagagtgccaacctccatgccctgcgggtggtaacccacctcgccgcccagcgcataagccaaaagctggtggccatagcacacgccaaagatcggcagattgatttgcattgcctggcgcaaccattccgctgcgtgttcgctccagggaagccgttcggtcaccatagctgctgaaccggtgatcaccactccgcagtaatcttctgggggcaacggtgtctcaccggcaaggacgtgcacgatatgcacgcgatctgcatcgatattcccttgttttaggaacatctgctcaaaattggcctgctcctgctggatcatctgcggtgcatcaccggtttgcatcaacaacagcggtttcattttattctccgtcagcggggaacactacgccggtctgacggcggatctccgtcagcaggctggcgacgatcagggaattttccaggccctcatgctcgacctgccgtttttctaccagttcggcaaacacttgcgcttcatacagcatggtattgatgtgttgcggctgggtcagtacctggctattttcaccgcgaggcgtcagcaccacgccttgggcttcggagattttttcgatcaccagcgtgccctcttcgccctggatctcactcggaatgtccgagttgctgaccttggaatggctgatcaccacgtcaaagtcaccatagttcaggcacacgctgccgtgggcatccaccccggtatcaagcaatgttgcgctagccaataccgactgcggtgcaccaaacagcgccacggtgctggccacgcagtaatagccaatgtccatgatcgaaccgttggaaaagtgcgggttgaaggtgttcgggttttcaccggccaggtaacggggatagcgggaggagtattggcaatagttgataaatgccttacgcagtttgccaatcttcggcaatgcttgttgcaagataagaaaattgggcaagtgggcgcttttgaacgcttcaaacagtaccacctgatgttcccgtgcgcaggccactagctgttccacttcgcgcagatttgacgccagcggcttctcgcaaatcacatgctttttatggctgaggaatagcagagattgttggcagtgcagagagttggggctggcaatatacaccgcatcaatcacgtcggattgcgccagcgcttccagcgagtcaaagaagtgttcgaccggatagttggcgccgaaggcctgcgcctgttcgagcttacgcgaatagatggcggtcagcctcatcttgccgctttcgtgagccgcatcgataaaacgttcggtgatccagttggtgccgacaacagcaaagcgaatcatgggtgactccagtttccacaggaagatagctcaaggaaccagattatcacgccgcagagaataggcgaatatttgcttaaaaaggcttattactcatagagttcgccgaataatgagagatgggtcagatacagacgggtatcaaactccaactggtgatagctgggttccatatggcagcacaggctgtaaaacgccttgttgtggtctttctctttcagatgcgccaactcgtggacgacgatcatgcgcaggaaaggttctggggcgtttttaaacaccgtcgccacgcggatctcggctttggctttcagtttgccaccctgcacccgagaaatggcggtatgcagccccaaggcgtgcttcatcacctggattttgctgtcgtaggccaccttgctcagcggttgagcattacgcagatactgatttttcagatcgacggtaaactgataaagcgacttgtcggtggtgcagccatgcacctgcggatagcgttgcaacaaaacctcgcccagccgctgttgcttgatgagttgttgcacctgcatttgcagatgatcggggtagccttgcaggtagctcagttcggacatgttattcagtattcagtagtaaaccggggcgagcattgtatgacgttttcttgctcaaatcccctaatgggcaattaatcccaaaaaacattttactgccgagcgtttttaggggataaacagcccaaatttatcattcaggaggggcaatgagccaactcgatctgggaacacagcaacttgagctggagcgttatccccaacaggaagaagccacccagctgcaggcgtgggaagcggcggacgaatatctgctgcaacagttggaaaatgtcgacatcggtgaacgcccggtactgattttcaacgacaactttggcacgctggcctgtgctctgcatggctataagccttacagcatcagcgattcttacatgagccagttggcgacgcgccataacctcaagctgaatgagctcgatgttgagcaggtcaccttgcaagacagcctggccgaactgcctgccaacccggcggtggtgttgatccgcatcccgaaagcgctggcgcttctggagcagcaattacgtgccctgcgtgatgtggtggcacccgatacgctgatcgtggccggtgccaaagcgcgtgacgtgcatacctcgaccatgcaagtgtttgagcgggtgcttggcccaactcgcaccagcctggcctggaaaaaggcccgtctgatttattgccaggtagctgacatcgtgccaccggcagcaccggcaaccaccgactggctgctcgacggcacggactggctgatccacaaccacgccaacgtgttctcacgcggtagcctggatattggcgcacgcctgttcctggaaaatctgccgaaggatttgcagggccatattgtcgatctcggctgtggcaacggtattatcgggatgcgtgccttggtgcagaacccgcaaacgcagatgaccttcgtcgatgagtcttacatggcggtggcttccagtgaactgaacgtggcgcacaacctgccgcaagagatggatcgctgtcagtttgaggtgaacaactcgctggcgggcattgagcgtgaaagcctgcaggcggtactgtgcaacccaccgttccaccagcagcatgcgatcaccgatcacaccgcctggcagatgttctgcgacgccaagcgttgcctgcaagtggggggggagctgtggatcgtcggcaaccgccatctggattactaccagaagctgaggcgtttgttcggcaactgcaccaccgtggcctccaaccagaagttcttgatcctcaaagcggtcaagtctggcgcgcgttattgatgtaggggcgcagcatgctgcgcccgtaaaatcaatggattacagtgccatggccagccgcgtgccctgatcgatagcgcggcgggcatccagctcggcagccacgtcggcaccgccaatcagatgcaccgttttccccatttccagcagcggctgctgcaattcacggcgcggttcctgccccgcacaaatcaccaccgtatctaccggcaagcagctttcctgctcggcacgcaatatatgcagaccttcgtcgtcaatacgttgatagttcacgctattgagcattttcacgccgcgtaccgccaggctggtgcgatggatccaaccggtggttttacccaggccttcacctaccttgctggttttgcgttgcaacaggaatatctggcgtggcgaggatggcacttccggccctagggcgctcagccccccgcgctgctctagttgtgaatcgatcccccattcgcggttaaacgctgccagatccaggctactggaggtgccatgctggctgaggtattcggcgacgtcgaagccaattcccccagccccaatgatggcgacccgttgcccaaccggttttttatcccgcaaaacatcgagatagttcatcacattggcgtgttcgatgcccgcaatggctggcatacgcggtacgatgccgcaggcgaggatcacctcatcgaaatccgccagatcctgcggttgcacctgctgccccagcttcagttccacttcattgagcgccaactgacggcggaaatagcgcaacgtctggtgaaactcctccttgccggggatttgcttggcgatattgaactggccaccgatctgctcggcggcatcaaacagggttacctgatgcccgcggctggcggcggtggtggcaaacgctaatccggctggcccggcccccaccacggccagttttttaggcgttgcggtggcgatcaatggcatttcggtttcgcggcaggcgcgagggttgaccaggcaggaagtgagtttgtgatcgaaaatctgatccaggcaggcctgattgcagccgatgcaggtgttgatttcgtctgcacggccttcagcggccttctgcacgaacgccgcatctgccaggaacgggcgtgccatggacaccatgtcggcacaaccatcggccaaaacctgctcagccaccgccggatcgttgatgcggttggtagtgatcagcgggatcttcactttgcccatcagcttgcgcgtcacccaactgaacccggcgcgtggcaccatggtggcgatggtgggaatacgggcttcgtgccagccgataccggtgttgatcagcgttgcgccagcctgttcgatcgccacggcaagctgttcgatctcctgccaactggatccatcctccaccagatcgagcatcgacaggcggtagatcagaataaactccggcccggtcgcttcgcgcacggcccgcacaatttccacggcgaaacgcatgcgattgctgaaactgccgccccattggtcggtgcgttggttggtgcgcgagaccaggaactggttaatcaggtagccctcagaccccatgacttccacgccgtcatagccagcctgctgtgccaatgctgcgcagttggcgaagtcggcaatggtttgttcaacttcctgggtagtcagcgccgctgggctgaatgggttgatcggcgcttgcagtgcggaaggggcgactggctgtggctgatagctatagcgcccggtatgcaggatttgcagggcaatcttccccccagcctgatggacagcctcggtcacgatctggtgatgggcaacctgctgtggttggtttaggaccgatgctccgcgatacaccacgcctttctcattgggggctataccgccggtcacgatcagggcgacaccggcagcggcccgctcggcgtagaatgccgccatacgctcggggccatcaggcagttcttccaggccggtgtgcatcgatcccatcagcacccgatttttcagggtggtgaagccgagatccagcggcgcaagcaggttggggtaagcactcattgcagtctccaatcgggtttatcgttatagttatagacgaccctcaagtggtcggatgagataaatttagccgttgtcggcgtacttgggaaacgcggatgtgctgaatgtgatagacctcatgtttgcaatcggtataaaagatcggctaacatcggctcgccttatcccttttctctctgcggagccattaccgaaaatgaacaaccacacctgctgatatctggccctgtaccgagcacgctcgtgccgtatggggaggttttgatttcattcaggagtgcttatggctcattttgcgcagtccccttatttcgttttacatcaattaacctgtcagtttgccaatggcgaaacgctgtttggcccgcttaatctggccgttgaacagctgcactgtggcctggtggggcgtaacggcgtgggaaaaactcgcctgctacgtctgattgccgggctggatcaacccgcgtcaggtcatattgagacgcaggcaacctttgcctatgtggcgcagcagccgcacttcaccgaacagacgaccctggcaacgttgctgggctacggtgaggtgtttgccgcccaggcccgtcttgagcaaggttgtccacggctggacgatatcgatcgtcttgagggccagtgggatctggcggatcgcttgagcacggcttttgcggcggcgggattgtctgattttgatccgcaacggccagccagcgaactgagtggtggcgaacgtatgcgtgcggctttgtgtggcgcgataatgtcgggggctgatttcctgttgctggacgaaccgaccaatcacctcgatagcacgggccgtgaatggctgtatcagcaattgggacagtggcgcggcggtctgttgattgccagccacgatcggcaactgctgtcacggatgcagcggattgtcgaactgactcctgaggcattacgtagctacggtggcaattatcacgaataccatcggctgcgggagcaagagcaacaggcggcacgtgctcaactggaacatgccgcgttggaaagacggcgcgtccgcgcccgccagcaaaaagaacacgacaattaccagcgtcactccgcccgtacgctgagaaccgtagactcgctgaatatcgcctcttttgagaaagctgccctcaagggggctgcccgcgacactatggggaccttgcgtaaacagcatcaggggcaaaagaacacgttggatgaagcggtacgcgaggcgagggaacgggttgaagaagataacccggtgatgctgaccttaccgggcagcgcgttagccacaggtaagcaggtgctggtactggaacagttacagctgccgttcgtctccttgccaccgctcgactggaggatggatggcccgatgcgtgtggccatcaccggcccgaacggctgtggcaaatccacgctgctgaaggtgatcctggggcaactggctgccagcgctggacattgccattgctcggtatcgctggcctacctcgatcaaaacctgtcccagctcgatctgactcgctcggtggtcgatcatctaggtttacaggataccccgttagccgaaggagtgttgcgtagccaactggcgcaactgcaactgaatgccgaccgggtcacgctgccgttggcggcattgagtggtggagagcggttgaaagcggcgctggcctgtgtgctgtggcggcgtgagcctgcgcagctcctgctgctggatgaaccgaccaaccatttggatctggcctcatcgcaggcaattgaagcggcgctggcggagttccctggtgcgatgctggtagtgtcgcacgatgaggatttcttgcgggcgctgcgattgacccatcgtttgttctggtcgacagcgggttggtgctttcaagcaatgtaaccctgcctgaggggccaagctggggagtttttggtatacttaaggtcattttgtgaggtttcgagacaatgactatgactccagtggcaacagcagccgaggtaatttattacaacggcactatcttcaccgcagatgcggaaaatcgtgtttgtagtgcgttggcgatagggcagggatacattcttgcggtagggactgatgagcaggtgcttgcgctggcgacacccaccaccgaacgcatcgatctgcacggcaaaatgatgatgccgggcctgatcgacagccatatgcacccattctggggcggcaaacagctcaaaggttgcagcttgcactatgcggcgctgacggctgagcaaaccctgcaacatattcaggcgcatctggataagtatccggctggcgatgacgaatggctgacggtacgtgcctggcagcgtcaggcgatgatcccggttggcgcggatatgagccgtagcttgctggacaccctcaacactcgccgcccggtggcactgttctctaacgattgccacacgctggcggccaacagccgtgcgctggagatgctgggcattgatgaaaataccccggtgccgccggacggcaagatcgcccgcgatgccgatggtcagctgaccgggatcctggaggatgctccggccatgcgtgcctttgacagcattccttccggcacggcggaacagaacgtgcaggtagcggctcatgtgcagcaggtgctgcatacgcaaggcgtgaccactgtgatggatacccgggtgtttgcggagcagttggaggctttcgccgtactgcgcgatcgcggtgagctgaccttacgtgtgctgggggccaaagaagtcacaccagacagcgtacaagggccggaagacgctgcccgggcggtgcaagaggttgtcgcctttgccgaacggtggagtagccagccttggacgccgcaggccgggatctctgttggccatctcaagctgttcgtcgacggcgtgttgcagccaccgactatgacggcggcgctgctagagccttatcgtgaacatcatggggaagccaaaagtgagcgttatggcgatctctacttcaccacgccggtgctgaacgcgctgatcgtcgagtgtggccgcgctggtctgcatccgcatacccatacggtaggcgatggcgcaatcgagcaggtgctggatgcggttgagctaatgcgtgcggcttgcccgggcaaggatatccgcccaggcttggcccataacgaattggttgcgccgcatcagtacgcgcgctttgcctctttggcggcaacggcggtgctttcgttccagtgggccggtttaccgggcgtgttgatcgatgaagagcgagagatgctgggtgaagcccgtttccctcaccttgagcccgcggcacgcttcctggatgccggtgcgcggctggcctatggcagcgactggcccatcgatcgcctggatgagtggtataacctgcaggtggggatgacccgccgcgcctgggatagcgaaggtaatcctgccgggccacgcctggacaacgatcgcgatctgaccctgatcgagacactgcgcgcagccaccatcgatgcggcctatatgatcgccaaagagcagtacattggctcgctggaagtgggcaaatttgccgatgcgatcgtcctgcaccataatctgtttgagcaaccggcagagaaactgtaccaaacccgcatcgagcggacgttggttggcgggaagatcagctatcaatcctgatagcaatgtgaattagcggtcatttttacctgggggcgttgcatgcagcgcctctacaaattcggcacattgccgtgaagggtaatttttaccgcttttcctcatcctgcaaacaataaatcaacgggttgtgccccagttctttacctattgccacccggttttctgaaagcggattgttagcttccccggcagcctaacttgtgccagaatccgtccccttgtttttaccgcagcgaatcaaatagcctattgggattggccctgaatagcgctgagctgcgccaggagatgatacggtaatgccgcaaaacattcggttgcaacgagttcttaaaacccccgccctggttgcgtttggccttgcctatatggtgccactgggcgtgtttaccacctacggtcaggttaccgtgttaagccagggtcacttacccgtcgcttatctggttaccatcgtgaccatcctgtttaccgccctgagctattgccggatgaccaacgccatgccgctggcaggttcggcctattcctacgtacagcgcagttttggtggtaaaaccggtttcctggtaggttgggcgcagatcctcgattatctgttcctgccgatgcttaactatctggttttaggtatcttcttgcacgaggcattcccatcgatccctgcttacgtgtttattcttggctctattgccagcgtcagcgcgctgaatattctgggcgtgcgcctacttagctcggtgaatttcacgctgattgccttgcagatggtgtttatcgtgttgtttatcgtgctggcatttagcgaggctgacctcagcccggcgtcattgatgaagccgctgctggtggatgccggtgacttctctggcctgatcgccggtgctgcggtgttgtgcctggccttcctgggttttgatgccattgccaccatggccgaagaggccgccgacgccaaacgtactctgccgcgcgcgatcctgattaccgtgatctgtgccggtggcatctttgttgccgtctcctacgccgcccatctggcctatcctgactggcaatcgctgatcccgcatcaggataccgccagcctgattatctcggaacacgtgggcggcaagtggatgtacaacttctttatggccacttacctcaccggggtgtatgcctcttccatgtctgcacaaaccggtgtttcacgtatcttctacgccatggggcgtgaaggcgtgttgccgcgtaaagtgttctaccaccttcatcctcgtttccgcactccgtggcgcgcgattgtgtttgtcgccatcatctcgttgctggcgctgtggatggatttgagcatggtggtgtcgatgatcagctttggcgcactgggggcattcaccttcgttaacctcagcgtgatcaaacatttcctgatcaaccaaaaacgccgtgggctgaacgcgatgttcaaatacggcctgctgccgctgattggcttcggtatgtcagtgtggctgtgggtcaacctggatcccgaagcgctgaaagtgggcttcacctggctgtttgctggttttatttatctgctgtggctgaccaaggggatgcgtcaggatcccccatccacccaggatgatatcaatcacctgctggattgatgcccccccccccccaacccccccccacagggagagggagctgttagtttctgctcttttggcagtcactcgatcggttcccacaagggagggggctgttagtttctgctcttttggnnnnnnnnnnnnnnnnnnnnnnnnnnnnnnnnnnnnnnnnnnnnnnnnnnnnnnnnnnnnnnnnnnnnnnnnnnnnnnnnnnnnnnnnnnnnnnnnnnngggagctgttagtttctgctcttttggcagtaactcgatctgttcccacaagggaggggggctgtgagtttctgctctttttggcagtaaataggcaatctcagcaaacgcgagcgcccccttcagccaaggcgaatcagccggtgctcatgaagaatcacgatactgtcagcccactcgatcggttccctctccctgtgggagagggttagggtgaggggcttatacactccaacaacacgtcaaacgccgccgccatttgttcttccggcacacaagcaaagcccatcagcagcccgcgtcgcgcgtttggcagcatgtaataccgtgacaacgctcttaccagcacaccgcgttcattggccgccgcagcgatggcgacatcgtcggcatcatccggcaggttgagtaccaggtgcagcccggcgttgctgttgaactcgctcaacgcctgcttacccagatgctgctcaatcaacgcggtgaggaacccacggcgtttggcatacagcaaccgcatacggcggatatgcgcggtatagtggccttcctgaataaactgcgccagcgccgcctgaatgatcaaatgaccaccacggtaaagctcggcgtgagccgtttttaactcgtccatcaatggcttgggaagcaccacatagcccagccgcagggccggatagagcgttttgctgaaggtgccgatgtagatcaccggcgcatcggcttccaacccctgcaaggccgggataggttggccggagaagcggaattcactgtcataatcatcccccacgatccagccgccagccgcacgggccaaagctagcagccgttgccgacgagccaggctcatgactgagcccaacgggtattggtgtgaaggggtgacaaaaatcagccgtggcaaggccgccggttgttctggtggcaccatcccggcctcatccaccgcccaggggcagatattgacgccgttcatgcgcaggatattgcggatcccccaatagccaggttcctcgatccaggcgtcatctccaggattacacagcatgcgggtgaccagatcgatcgcctgatgaatgccttcggtgatcagaatttgttccggcgagcagcgcaccgaacgcgacacccgtagatagtccaccagcgcatgccgcagctccgggctgccgccctggttgctgtaggttaagcgctgtgaagtcgggcggcggctgatgcgtgcctggagtttgctgaagatgtgatgcgggaaagcattcacgtcggggacgccgggaataaacgctccccactgtttcgggctggcgctggcgtgttgcagtagcgtgatgccacgttgtgacagctcggcacgccgttgctcaccgtcaacggcaatcggctggctggcggtggataaacagctgtcgggtaccgtttctgcgacgaaggttccacttccctggcgcgaaaacacatatccttccgccagtaattgttcataaacggttaaaaccgtattacgtgagaggcccagctcttttgccagatcgcgtgacgccagcaggcggctggaagggggcaggctgccgtccagaatactggtacgaatggcattgtataaccgcttgtgcagtttatcatcgggctgctcgccgaggcgttgcagcagcaggtcaccactcaatgagcgcaattggatccctcaattaatcgtaactggcactcgattatagggccacatccggtgtaaataaacgcaatgtttcacgtttgtgaacaaaaccgataactggtcccgcccggagagaacagcatgaaaaacgcagaactgaatcaacgtcgtctggccgctaccccaagagggattggcgtgatgtgtggtttttacgccgagcgtgcagaaaatgccaccctgtgggatgtggaaggcaatgaggtgatcgactttgcctcaggcattgcggtgcttaataccggacaccgtcatcccaaggtgatcgccgccattgaaaagcagctccaggcgtttacccatacggcataccagatcgttccttatgaaagctatatttcgctggcagagcgtatcaaccaacgtgctccgatcgaaggcacctgtaaaaccgctttctttactactggcgcagaagcggtagaaaatgcggtgaagatcgcccgtgcttataccgggcgcccaggcctgatcaccttcggcggcggattccatggccgtacctatatgaccatggcgctgacgggtaaagtggccccttacaagctgggctttggcccgttccctggctccgttttccacggccagtatccgaatgcgttatatggtgtcagcaccgaagatgccatgaacagcctggaacgcatctttaaggccgatatcgaccctaagcaggttgccgcgatcgtactggagccggtgcagggggaagggggctttaacgtggctccggcagaattcatgcaggcgctgcgtacgctgtgtgaccaacacggtatcctgctgattgccgatgaggtgcaaaccggctttgcccgtaccggcaagctgtttgcgatggaccactatgcggtgaaaccggacctgatcaccatggcgaagagcctggctggcggtatgccgctgtctgccgtggcgggccgtgctgaagtgatggatgccccagcccccggtggccttggcggtacctacgccggtaacccattagccgttgctgccgcgctggcggtattggacgtaattgaagaagagcagctgtgccaacgctcccagcgtttggggcaacatttggtggaagtgctgcaacaggcacgtagccactgcccggcgattgtggatattcgcgcgctgggttccatggtggcagtagagttcaacgacccggcaaccggtaaaccgtcgccggagtttacccgtcaggtacagcaaaaagctcaggaagaaggactgttgctactcagctgtggggtgaacggtaacgtgatccgtttcctatacccgctgaccattcctgatgcccagtttaaccaggcgctggcaatcctttcccgcgcgctggcccaataaggagcaatattcatgaaactgcaaaatcccgatctgctgcgtagccaatgcctgattaacggcgagtggtgtgatgcgcgcagcggcaaacgtgaagccgtgatcaacccggccaacggagtggagctgacaacggtgcctctggtgagcgcagaggaaacccagcaggcaattaacgccgcgcagcaggcacaaatcggctggaagcaacagaccgccaagcagcgttccgtattgttgctggcctgggccgataaaatcatggcagctcaggaagatctggcgcagctgatgaccgctgagcagggtaaatcgctggcggaagcgcgtggcgaagtggcctatgctgcctcgtttattacctggttcgctgaggaagccaagcgtgtagacggcgccgtattacaggcaccacaggcttcgcaacgtctggttgtggtgaaacaaccgatcggcgtctgcgcggcgatcacgccgtggaacttcccggcagcgatgatcactcgtaaggcggctcctgcgctggccgcaggctgcaccatgatcgtcaaaccggctgagcaaacgccgctgacggcattggcattggccaaactggcgcaggatgccggtattcccgcaggcgtattgcaagtagtaaccggcgaagcggctcaggtgggtaaagtgctgtgtgacagcccggtagtacgcaagctgagctttaccggctcgaccgaggttgggcgcatcttgatggcgcaatgtgcgccaaccattaaaaagctttcgttggaactgggcggcaacgcgccggtgatcgtgtttgacgacgccaatctggacgcggccgtcgccgggatcatggcctccaaattccgcaacagcgggcagacctgcgtttgcgccaaccgcatctacgttcaggacggtatctacgatcgcctggtggataagctggtggccgcagttgagcaactgaaagtcggtgatggcacacaggaagggacgacgcaggggccgctgatcgatgaggccgcgatagagaaagtgcagagccacattgatgatgcgctgatcaaaggggcgcagatcgccaccggcgggcagccgcatgcgttgggacgtaccttcttccagccaacggtggttaccggtgtgacccagcaaatgcgctttgccaaagaagaaacctttggcccggtcgcgccactgttccgtttccatgatgaagcggaagctatcgcgatggccaatgataccgaatttggtctggctgcttacctgtttacgcaaaacgcggcccgtcaatggcgggtgccggaggcgttggaatacggcatggtgggcatcaataccggtttgatctccaacgaggtggcacctttcggcggtatcaaacagtctgggctgggtcgcgaaggctctcgctacggcatcgaagagtatctggaactgaaatatctgtgtattgacgtaagctgttaaccctcaagacttgaacgctccccgcgggcctacgctgggggcgtttcctccgagcaagaagtaatgtttctcaccgtgagaacggcggcgttgtggccgccgatttttttagctccgcattgtctctggtaatgccaaccacgcctgcactgatgggcgctgccactgtttttgtgcatagtggcgcagcggctccggcacctgatcgccatgtatcaccagccggttgagcatcagcgccagatcggtatcggcgatgcaccattcgtggaacagatgatcctggccgtggctcagcaacttttgcgccgcggtcagcagtttgttggctgcccgttgggcatctgcactcaatggggcaaatttgaccgcgctgaaaatcacctcggttgggcgttcggcccgcagcggcaacagatcgctacgcaaccatgcctggatctcacgggctttggcacgctgtttgatgtcacgcgggtagagcggatgggctgggtggagttcttccaaatattcctcaatggcggaagactcggaaagctggaagctgcccatcaccaacgtcggtacccgcagcgttaacgaaaggctgccgtaggcctggctttgctgttcccccagtgaaagatccaccggcttgacggtaaacggcatgcctttctccgtgagtgccacaaaggtcgacatggcataggggctgaaaaagtcgctatcagtgtagagaacagtggccgatgggttcatacggatccttgaggatgggaaaagtatttgggatcattggctaacggcgcaataaaatcaaggcgatggccgatgattaatcgtaatggcgtattaggcacggtgatggcggctggcaatcaggagtcactgaccaggattatccccagccgatcgattagcccaacgacttgctggctatccaactgtaccccctccagatcaagctgtcggatatccatctcccccagttctgcgccggtcagattgcagtggttgaaggtggcggcccgccagtcaaactggttgaactccccgccggacagatcagagccaataaagctggctcccaacacgttagcgccactccagcggttttcccacagctcacatttctccagtaccaccttggagaagttgctgtagctcagattgcttttgatgataaaggcgctgcaaaaatagctgcgctgcgaaatcatgttcataaagctggcaccacggaaatcagccccctgtgccttgcattcgcggatctccaggccgagggcctgggtatttctgaaatcggccagtgagagatcgcagcttttaaagctggcatctttcaacaccgcgcggctgaagttacacccgagctgggtctcttcgtcatagaaaacacagccgataaactgggtatcagtcagatcggtgccggagaaatcgcagttcagaaacttgccgttggtgatggtttcaccacggaattgatcacgggaaatcttggcggaatgcagcagtaagggttgcatgttagcacctgtttttttatacagcctatggtgatactacctgaggttaacggtgaagggaaatagtgtataaagcggtcagcttgcttgatggccttgggttttaaatagaggtctgtgctctcatcggcttaactctttcttaagcttatatcactacactgctcattatcagtcagaggggcgcgatgatgagtatatatatccaggcaccgtaccagctgtcgtttgctgaggaccatgagcacagggccttattacaggcttatatacagcacgaatacggtcggcagtttaatgcgctcattcctcacttcctgccttatctgttaggcatgtaccgcgctgatggcgttctggttggtgcctgtggtctgaaccgtgctgacaactcggtgctgtaccttgagcgttatctggatgcgccgattgaagaggtggctgtcgcgcagacgggaataatcttgccacgtaaccgtctggttgaaataggaaactttgcctgttctgaatccggaaatgcccggatcatgtttgcggcgatttgccggctactctacgaaaaccaattcgaatacgtggcatttaccgggaccaaaaagttgagaaatatcttccaccggttgcacctgacccctctggaactcgcccctgcattgccggatcgaatgggtgaagatgcccaggcctggggagaatattatcaggggcagccctgtgtcatggttggcgatcttaaacaaggccgccaaattctgagtgaaaccagcttattgctttcattgtttggccccatgccggatatctttcccgtgaaaatgagcgtgcagctatgatcctttttgagcgtattgaacacattgcggtcacagacggctctcgccctgcgttatgtgatagtcaccagagcatcagctacgccgatttattgcggcaaaccgcctctctggccgagcaactccgtaatgagaaaatatcgcggctggccctgtttttgaataatggcctggagtgggcgatgatcgatctggcttgcctgttagccaatattgtcatcataccggtccccgtttttttcagtgctgaacaacaagactggttgctggaaagtagcggtgccgatgccttgattgggcctgcccggcaagggtggctaacgacccccttccttgattaccctttgcaacggcggcagccactgtctgttgctgaattgcccgccaatacggccaagatcacctatacatcagggacaaccgggcatcccaaaggggtatgtttgagtcaggaacacttgatgcaagtcagcctggcgcttgccgagcgggttgctgcggcaaacatacagcagcatctggcattgctgccactgtcgaccttgcttgaaaacattaccgggctgtatgttccgttgctcagtggcgcatgtagccgtatcccctcgctggctgaagtggggttgacaggatctagccagttctctgctcagatccttgcccaagctattacacaatggcggccgcacagcttggtattggtgcctgaactgctgcgtttattcattatgatgtgcacccataacccagggttggcggagagcctgcgttttgtcgccgtcggcgggggaaaggttgctgcggatttagtggttaaatcgcatcaattgggtttgccggtttttgaagggtatggcttatcagaatgcggctcggttgttgccctcaatgcgccagggcgtgcattgcctggctcggtgggtgaaccgttaccgcactgccagataaccatcgctccggatggggagatcttgatttctggcgccacaatgctgggatatctgggggaacctgttgcaagatccccggtagcaaccggcgatcttggtcattttgatgcccaaggttttcttcatatcaccggccgcaaaaagaatattcagatcaccgcctttggccgaaatttttcaccggaatggatcgaggcggaagctcagctttttccggcaatatcccgcatggtcatctttggtgatggcttacccgcaaatgttgcactgatccaggtgacacccggttatgaaagtagccttgccgatcagctatctcaacttaatcgacggttacctgactatgcacggatccatcattattttttggcacagttaacggttgaaaacggtttactaaccaccaatgggcgcccgaaaagacagcagattttgtccacctatcacacacgtattcatcagttaatcgcgggagatatcacatgagtttttatcaattgttacagcgagagacggcggtggacagagagaagctcctttccgccccggtcatagaggcttgccgctgcgggaatattaatgccgcaatgtatatcgcctttttgacacaggctttttatcatgtcagccataccgtgcctttattgatgactgccggtggccggatgaactcagaatatgaatgggttcgcggagccattgccgaatacattgatgaagagtatggccatcaggaatggatattgaatgatatcaggacgtgtggcggagatgccgaagcggttcgtcatggtcagccggtattggcaatcgagttgatgattgcgttcctctacgatcacgtctctcgcctcaaccctatgggtattttcggtatggtgcatgtccttgagggcaccagcgtcgccattgccaccaccgttgccgaacagcttaaacagggcctgggattaccggggaaagccatgagctatctcagctcgcatggggaactggacaaagaacatctggccttttttgcatcattaatggaccaggtggaaaagagcgaagatcgtgccgcgattatccacacagctaaagtggtctaccaactttatggcgatatgctgcgtggcctgatggagccagtgcaatgaggctcaacaacagccgtattttgcttaccggtgccagcggtggtattggccaggcactggctcatgctttggcaaagcagggggcttgtctgatattacatgggcgtaatgaaacggctctcaccacgctagctaatacattaccccatccgggaaatcatcaggtttggatcgccgatcttgacgatttcacgccattgacacagcaagttgagctgctttgccaacaacagcatattgatatcctgatcaacaatgccggggccaatcattttgcctggcttgaggatcaaagcgagcaacaaataatgcagcagttagccgtaaatattcaggccccaatactactgacccgggctttgctgccttatatagaccgacccggcatcattatgaatatcggctccagctttggcagcattggttatgctggctatagcgtgtattgcgcgagcaagtttgcactgcgtggcttcagtgaagctctcggcagggaacttgccggctcatcgattaacgtgctctattttgccccccgggcgacacaaaccacgcttaactctgcggcggtgaatgccatgaatgctgagctaggtactaaaagtgacagtgctgaatgggttgctgatgaggtgattgttgcgctgaacaaacagataaaacgacgatggttgggttggccagagcggttctttgtcaaactgaatgcactgttccccgcagtggtcgataaagcgttggctaaacagcggcatattattgcccgccatgccaaagctgcccttgagaagaaggactcacgatgaaaaagttattgttggtgttgacgctctttggtagtacaaccgctgttgcccagagtgatttggccgatattcagaaccaatgggcggtttgccagtatcaggtggcggcgaaacagaaagaaagctgtctggagcaactcagcgccgttgcggataaagccagttcagctaacggttcacgcgcagacctgttgatctggtctgcgatcgtcaagagtagttgggccggtgagaagggggggctgggggctttggaactggccaaagaggcgaaaatgaagttggaactggcaataaagttggatgacaaggcgctggatggctccgcctataccagcctcggagccctctattatcaggttcctggctggccgattggctttggtgatgacaagcaggctgaacggttgttgaaacaggctttacagattaatccaacgggtattgatccaaactatttctacggtgactttctgatagatcaagggcgtaaggcacagggcaaactctatctacagaaagcgctggcagctccggcccgcccaggcagagaattagccgataaaggccgccatcaggacattcaacaacgactcgataaacgttgatactacgggtccataaagggaaacaagatgcaccgggaacgacacagcatggaaaaaattggctggctgcgggctgctgttctcggtgctaatgacgggatagtctctnnnnnnnnttggggggtggggggggggggggggngcgtcggctaacgtcactcagcaaagtttgctattgaccggagtggctggcttggtggctggtgcgatgtcgatggcaaccggtgagtatgtttcagtgtcttcccaggctgatactgaaaaggccgcactggctgaagagcaagctgagctgaatagcgattttcagggtgaacaccgggagttaacctcgatttatgtccatcgggggcttgatttggctctggctaaacaagtggcagaaaaactgatgcaccatgatgcgctaggagcccatgcgcgtgatgaactggggatctcagaaatcaccaccgcgcgtcctttacaggccgcgtgggcttcagcgttgagttttgcagccggggcaatattaccgctatgtgtagcggccatcgcgacaactgaatggaccatcctcgccattgcctgctcagcattggtctccctggcggtgctggggggcgtttcggccaaagtgggcggtgcacccatcggccctggcgtgatgcgcattaccttctggagtgctctggccatgggggtgtcctcggggatcggggcgttatttggtttggctacggggtaagagtgaaactaatagcacgatgtttttctctgagtcgccgtcactcaaaagtacggcctttctcaaaggtataatccctgttgatggtgttaggtatcaaagggatcggtatgttctgccaaagccaaggtcacgtagagatccatttaattgtgattaaatataataccaattctttattttcccattcaaatattacctgattttaattatcataagttaaagtgaattgtctgataacttacaaagcagtttctagtggaatttatgagttattcataatctaatcataaattagtgatgtcggcggcccacttctgagttgggccattggtggtaaatacctgcagtagtcgtttttacaatagggagttttttcagttaacagtactctaaaagtttccaatttttcctaaggaaggcataaagcccgatattactcgtgatgttaagcttattcatggcggattttttctgcgaatggactgtcttgacgtttttattcaagatgttggcaatcgaggtcaggccgtactcctgattaattaatctaagtacctcgatttcatttttcgtcatttgatgcttgtcgcatatatcacattgttttcgcataattttattgtagaggtatttgtctttttcatgcaagcgagacagttgtctgctgaccttttggatgactgtcgatggcgggtcttgccgatagataattgggagttcttgagtacaagtatgtctttgactgggagttattttattcacttcatattcacagatggggaaaataatacccataaaatgccttcctagaagtggcagggcatcgaggtagtgagtttcatgttcaatctcctgaaaaaccaagtctgcgtgcgccaagaaattacaatcaggatcggtaaaaacgatctgagtatttctatcggtaaaatattgagttaatacgatgcgcaaggcatccatataaaatttattactgtctcttatgactatgcttagcatgattttttcactcatgaattataaaaaataaatagctcattgcttaatgatttttactgaaaataataagtcttactttggtttcctgattatatattgattgattgcctaagtaatattctcttctctggtgatcacaatagccctcctgcatgaatctataaataaggcgtaactgtgaaactggtaatatctgtctggatttcacaccgtcctgcccaggctggaggggtgatatttgtacccgaccaatctggtgaggatgagactttatagtaatggcgtactggtctgcgttgtgggggtataaatgatgcgcaaactgccggtataacgtccagccgtcttgtctgccagacgaaaggttggcgttgtcagggttatgggtgcaggtacgcacagcgcgacaccttgcacacccggtaatactacctgccgctggatattacgccgattggtgttggtccagataatctcgctgccgtttgacacattctgtaccgctcccgttgtcgggtttatcacgctgacctgatagtccagccgattagccgcctgatttttatccgctccttgccggtaaacggagaactgcccagccgggcgaccagacgcgctggcaccttcgtcctgaaatagcaggctgatgcggttactggatgaattgctgccgtcatacaagcacatatccaacgaggttgtgccgctagcggtggtgtttttcgcacccggccggttattcaggttaaggttcacctgtggcgtagcattagggaatgccgggaagtagatttgctgtctgccaagatccgtcacgtccagcacgatgttggcattccagtcagcccggtgaaaaccgtcacacccggtggttaaatgtgtgctgcaggtactccatgccatcacacgcatttttaaacgggcttgccatcttcctgacaagttaagtttattaagctccgatgcgggaatataaacagagagcccgttctgaagagcggcagcattccatgatgcagacatgcccaggtcaagaactttaacactggttaaatttaacgtaacgctggtattaccctcatgtttgaagatgagcttgaggctgttagctggcacggtactgtaccagacaagttttgtcgggcaggcaccattggtcgcgtcgttttgtgagtaacaaatcaaactattcaggatatccctattattacagtcattgctatctgcgcatccagggtttgaacttccgccaaaaacgttatcccaaatagacagacgagccggcgtgctccttttatcaaacttcacattgatcgacgtattctgtggctgaggaggaacgtccaccatagtgacggaacgaggcgcgtttcgcattaacagggaacggggcatatccaccgctgacgcggaacccggcatatccgccgcagaggcggagcagtggaaaccatacgtcaataacagcaatagtttgacgacaacaacgggattaaacccaaaagaaaaaatgcgatacatgacaactcctgatctgatggttttttaccatcacctgttttgaaccgtgctgctgtctttatggcggttccccgccgtcatcagttccacctgtttttgctcggcaccgggcaaattcgccatctcagtgctggcacactgagtggtgcccacccagcgtactacgtcgcgtatcgcttttaccttcagttggcactgccagaacgcgttttctttcatcaagtacagcgttttcagcaagttcgttgtttccagcgtaaaaccgccctgcccaagcggcgtccaggacagtacgtttaacgggatcgccccctcaagtggctggttattttcatcggccatcctgcccagccaggtgtagtgggatgtcacttcgatactgcggttaaacactttacctggcgtcaaaaataccgtgcgcgaaccggcccctttgctgatttggctgttaatccccgccagcgcagaggaggactcgttgacactaaaggtcgactggcgataggcaggtacggtaaataccgtccggctgttgccgctgacgtcagcctgcccggcactgtcgacggagacgttaacccgtgaagcccaatccccttcaggcgtagccacactcaacgcaatggcagatgagggagagccgtccccccagcgcccccacaggagaccagtccgatcaataaccagcgaggaaccgtagttaccgctgctgctcaccgcgtggcggttttccgcccggtcatacgcgtcgctgacggtgagcatggcattaccgtactgcccccccatgcgaccgtatgccgatgcggttgccgtctgcgcattgatgccgtaaagcgatgcaccgagttcgttttcaccgttgccgtcggcgtagcggctgtaggcggcgttgtagctcagtcgttcccctctgcgctgacttttctgccagttggcccccagcgacgattggctacgcttgttgccaaacgtcaggctaacgttgagaaacgccacgttgtcgaccctatcaatgctcgattccaggcgggtaaaggcgttaatgctggtattgatgttgatatcattcatcgtgaaggcgcggctgagccccacctgccaggtgcgactgttagagcggcgggtgtagacctgctcccatggcgcgccaccccggcgttgtatgtcctcgtccgaaagctcacggcgatagacgtaactcccttggttgctgctaattgcatagcccaggctggcgttccattgtgcgatgggcaccgacaacatcaggctagtactcttgtaacaaccgctatagctgtagcggttctccgcccgctggctacagtctgcagccgtcatttctgcacggtaaaaactgagtgaaaagccatcgttataattcaactgttgaatattgccctgggaaccctcgctaccgtgcaaatagcttatccgcgaggtcaatacgccatcgagggggccgctactgaaaccgtggctccagtccgcggcgctttcccaatagcgggcatcgctcaacagagtgctacctgccgtcagggagaacgtatcggttagcggaatacggataccgccctgtaccacgcgttgactctcgtcggcgcgctggtgttcacggctaaccaggttgcccccctgtaaaaaccactgaaaagtattcagcggcgcgcttcccgtgccggtgtaggggagtgtttccgtcctgactaattggttattttcatgaatacgtagggtcaccgtatagctaccaatgggaaaggttcgggtatccagcgtctgcgcaccagccttcagataaaatgatgtgagcagttgaccatctcggtaggcgtctacgcgagcctcccgggccaggaacaggctcaccggcgttccctgaacaaccgtgtcccgattgatccacgccaacgttgaaccaatgcgtacaccacgggttttacccagtggaagctgactgaggttaatgttgccccccatgttgctgaatatatcccgtgagtccatgatgccgccctgcaggtagatctgtttcaggaagtcctgtcggaaataagcgttgttcacgttggtctgctggacactgtccgagcggaagcgctgcccctgccagttccagtcgacgttgataaagccgttcttcgttacccccaaagaaccgttaccctgcactgatgccgattgataatcctgatcggcgacaaaattgacgttttgctggtgtacaagggcgttatggctatcgaacgtgagatcgtaatatttatcgtcgtttttcttttctggcagaaatgcttttccgaggaacaggctaattcgcccgtagttttcgtcataaataatggcgacggtgtcagtatcaataaagtcgcagcccggcgcattgccactggtgctgcatgcaaggttgccattgcgtttaaacggctgctttaatgagctgcgcagcagtaattgaggcgcggatggagcgttatatttttcctggatcgcggcggcaatttgatccggttgcaaaaaaagcacattttcgagatcgacgttggcctgaaaaagccccagagatcggccgtacagcgatatctccagccagataacctgccctttggccaggtcttcaaagccagcgggcacatgaggggaagccgccgagtgggtgcagacccaaaacagggctgccagcgcagcggataaaggctttattctgatattcatccgtgacatccaggaaatcaggcgaggctatcagcctcgcctgtcagaggtaatacgtgctgttagcccgcgttttttgccgttgcctgggtaacgacaaggctgacaataccgctgtacttgcccgaggcggtggccacacccgcggtagtctgcgagataatcagcggcattgccgcagaaccattagtgacgcctgcagggaaggtcgtggcgtagttaaacaccgtagtggtcgcgctcaatttctgcccgttcaacgtcacgctaagcgggatagcattgttaccgctctgatcggtcaatgaaggagaagaggccaggctgacgttgagatcgcgatcggccgtgtttgaccacagcttgatgttattacggtatgcttccagccccttgcccggtagatactgcatcgtaatgctggctggcagcgcactgttatcggcctgcgtgatggcgatagtgggatcgatatccgccgtcacggtaatatcctgctgaacggcgttggcgttaagggcggtcaataaagccgctgagctcagtgcaattttgaaaatacttttcattgaagactccataagtgatattgatgctccctttaattcaaaaggggttggttcacctgactggcaggtaattcgatttcttccgtcgcgtttttaagccaattgtaatattttacccggtattttttttggggtgagaaacgcacgttggcaaggcgtatcgtcgtacctggatacagggtcgacgtctcttttttccatgaacatgcgcctgttgtatcgcatattgctaattctctcagtggcaggcgaatggtaccgctatttatcacctctgctgagtcagggttatatttcaggctgacaatagcgtgcgcaggtgcaacatgcaccaatgcgccccatacgatgctaacgccgacttctgcattgctgcttttttggttttcttcgctatttgtcttgttgaaaatattttccgatacactttcaaagtaaacacgccaagtggtttcctttggtggaaaagaaagggaaaccagtcgtataattctttcccccccggccgtaagcgccagcttttgcggcgtaacgataagtgcctctccagaggatatatcagcggtaacctctttttcgttcggcgttccagggttgattattctttttaaactaaccttaataaattgcacctcatcgctttgagaaaaaattttaatttgcgttgagccatttttatctactgcggtctccatcgggtacaccaccattgatgcccgaccggaaaaacaaaagaaagcaagtgcaaaggcgacgcacgctagagtacgttgtagcaaaaaatacctgttcattggtgttcctataaaaccttctctggagcgtaaatatttgttattcgtacgacatcactgtgcttcgataactcaataaagtttactgccaaagaaattatatttatatttaatactgcttaattttaacattgagagtatttcactttattaattaataaattaagcattttatgctgatataaatattaattagattgattattggtgtttaattttattcattatatagtttttttaaattaaaaataaatacagtaatcaatggttgactctgggtaggcatataaaataagttatactcagcagaaaaggactctttaaagtccttggagtttaaatctcaacaccaagaagattcctatccatatgaaatacataattaatcttgtgcttttttttgactctaacaccagaatgctagcgctaaaaaatgatgaaactctatccgtagagttatcaaaacccgctaatcgattgttatgcgagctgattattaacaacaatatcactcttgctcgagaggatattattaaaaaagtgtgggcagattatggtttttcaacatcaacggccactttgaataacaatatcagtgagttaaggaaagctttctcaaatctggggttcgatagggaaatgattgtcaccgtgcccaaaataggtttcagaatggaggcgaaaattcacccggtaaataaaaaagataaattagtcgatgaggtgatgacagaagttaaagatgtggccattatggatgaatcctcacaacaaattaatgaacacgtcctatctccgtcagaagatcgagccggtggggaaaaaaaacaaagcaggccgaagacaggcatccttgttgcaggtataggtatacttgtgactgctgtcactgtaggtatgactctcactatcttacttcaaagagaagctattcgcccggttaccaccatcgggaaatgtagcatccatagcttaaataatacccccaccgcctctaatttcattgagcatgtgcaagatatgatcaaaaaagagaaagtggattgtaacaatgaacccgttgaaatctattacactaacacacgccaaggcagtaatttattgacggtgcgttttatggctgtttgttaccctattgatgatggccattatcagaattgtgaaaattataaaattgtcaggtaagtctataaatgaaaaaaatcattatgtcgttgctgtttatcgtcgctttatgcggctattttttttacaaaaattatagcagtaaaccctttcgctgcgatgctcatttgatttcactgatcgaacaggacgtcaatcatgttgaggtaaatctgtatgaaagcatcatattcacgttacctattgaagggatggtatcaatgacaggaacagttaaacagaatgataaaaactatcttgtaagcagaacgctgtttttcactatcaaaaaatcagggttgaaaaataactataaagtagaaataagtcgtgaagacgttgataaaagagatgagcttccagaggatttatggctgaaatatattttcccgaagtctataggtgttgaatattactctgaggtgagggagttgaacaaaaatgcaatattacttcagtcgctttctaatccacagttagtgtgcgtacgcatagaaaattaggtgacgccggcaataagccttagggaatgaaggggaatacagtaatctgtgcccagaaatagggttctcgccgacgcacggaatacctgagtcttccagccacagcgtagtggcacactgaatttggctacctgaacagaggtgatattctcacctctgttcaggtggaaaaaaaggtaacgcattaaaaaatataaattttatcgagatggtgaaacgcaaatccgctcaacaggctcttgaccaaaattacaccgttgcagattcggccagcgctatggatatcgacctttccataatgatgcgatgggtaaaacaactgcgtaatgagtgtcagagcaaaacgccacaatcctctcctataactccggaacggattgaaatgcaacagcttaagaaaaattttggtcaaatattcaatatgttgaacgtctcaattgtaagacgtaggggtattcaaaatcatccgccatgcacaacaggttcatcggtactttcattgagcaaacgtattacgttttaagctgtatcaactcattgaatacatgacccaaaaaatgccttgcagaataagtgcggataaatcatcatttgaaacgacgtttcattcccttgctacaggccaactttgaacttacaccggctactgccccagcgcgttgccaagacgcattggtatgccaagcgaaaaagctatcgggtgcttttttggcgcgagatcacgccactggcgggtccgatctttctggaaaacacctgcgtactgctgatgggggtgctcagcaccttcctggtgagctggctcggtaaagagtcgatggcgggtgttggcctggcagacagtttcaacatggtcatcatggcctttttcgcggcggtggatctgggcaccacggtggtggtggcctttagtcttggcactcgcgatcgcaaacgggcgcgggcggcggcacgccagtcgctggtattaatgaccgtgctggcggtgctgctggcggttgggatccatttggccgggcaacagatcattaacgtgatcgccggtgaagccacgcccgaagtcaaagcgttggcactctcttatctgcaaaccaccgtctggagctatccggcagccgccatcgccctgattggtagcggtgccttgcgtggggcgggtaacaccaagatcccgctgttgatcaatggcggcatgaatatcctcaacatcctcatcagcagtacgctgatttatggggtatttggctggcaagggctgggttttgttggcgcggggctggggctgaccattgcgcgctatattggcgcgatcgccattattgttgttctggcggtgggctttaatccggcgctgcgtattacgctcaaaagctattttacgccactcaacagcagcatcctgcgtgaggtgctggggattggtattcccgccagtatcgaatcggtgctgttcaacgcgggcaaactgctgacacaaatgtttgtcgccgggatggggaccaacgtcatcgccggtaactttatcgctttctctattgcggcactgattaacctgccggggaatgctttgggatctgcttcgaccattatcgtcggtaggcgtctggggaaagggcaaattgctcaggccgaacggcagatgaagcacgtcttttggctggcgacgattggcctgacggtgattgcctggggaacggctccctttgccgggctgtttgcctcattttatactcaggaagacgatgttaaagaggtggtcaaaatcctgatttggctcaatgccgcgtttatgccgatttgggctgcatcctgggtgttacccgctgggttgaagggcgcgcgtgatgtccgatttgccatgtgggtgacgatgttgggcatgtggggctgccgggtagtcgccggctatatcctgggcatcgtgctgggcatgggcgtagtgggtgtctggctggggatgttcttggactgggccgttcgcggagtcttcttctattggcgtatggtcagcgggcgctggctatggaaatatccacggctcagaaaaaaccagcctgagtcagccgaagaacagccaccaagctaacggtattttattagcctgagccgggttggcagtatcaatccattgtcggcggttatgttttggtgtaagactgatgccacgataaatgatctaaaggtgcaccatggatggattgatatttatcgctggtttggcgttgttcctgtgcctggtggtattacccatttcagtggtggtatcgctcagccgtggcaaccgcaaccagcgggaaattgcccaactgacactgaccatcacccagttgcaaaaacaggtggatgatctccgcttcgaggaaaccgggagatcgcggccaacgccaacgcccgtttctcaggcgcaacctgtggctgcgaagacaacgcatgactttgcggcgcacgcggcacaacagtatgccgttaaacccgcaactgacatggccgtttcccctccggttatatcgccatgggagcccgcagctccaaaaccagccgcaccagtaacaaccatccctcgcccacctattgctgataaacctgccattgataagccgcagcagccgaaaaacgacctgctcagcgggctggtgggctggtttatgcaaggcaacccgctggcgaagttgggggtcttgctgctgttcttcggtttggcttacctgatgaaatacaccgttgaacgcgacatgctgcctattgagttcaggttaatgggcgcggcggtggcgagcggcgttttactgtggtttggctggcgtctgcgtgttaaacagacgatgtatgccctgatcctgcaagggggcgcggttggcgcgctctatatcaccgtatttggtgccttccggctttatcaactgttgccacatatgctggcatttggcctgatgctggtgatctgcgccgccagcgtgggcttggccgtattgcagcgcgccctcagcctagcgatgcttgccagcattggcggctatctttccccgttgctgctgtccaccggtggcggtagtcatatcgcgctattctcctattatctgctgctctcgctgggcattctggcgatcagcgtctggcagccatggcggccacttaacctgttgggttttgttttttcctttggcgtagccgggctgtggggagttaacaactacctgccggaatactacctgggctgccagctgttcctgattgccaatatcgtgatttttggcgtgctatgcctggctttgactctacgtgcacagttgcctggcgagaagattatcgatggcgtgctgctgtttggcccgccgttaatcggttttggcatgcagtatctgatcgttcgtcagtgggagtttggcccggcgttttcggcgctgggcttcggtttggcttatctgttactggcctgggcagcattgaagcgctacccatccctgggccgcatgttggcggtttccggtttggcgctgggcggagtgttcactacgctggcgatcccattggcactgtctgctgagtggacatccatggcttgggcgctggaagggttgggcattctgtggcttggtcgtgaacaaaagcaaatccgcatgagcctcagcggttctggtctgttggtgctggccttggcttcagccctggtcgctcttggcgcaggaatgacgacgctctccttcacgctggtgttcgccgtactggcattaacttggctcgcggtggcattcctctggcgcgatctggagagcgatgctgcattcaggctggttgtaagccgctccttcctggctggcggcatcctgctctggctggtttgcctgctcggttttgccgggcgattgccgctggattatggctacggggctttcctggcgttggccttgttgacgctatccgtagtgctgtggcgttggacggcacaaaggctggcttggctcgaactacgttatagcatttggctgctgtggccgggcatgttggccatgctgttgttccaattagtcgactttgattctttattgttcttcggctggccgaatctggtctggttactgaccttgccggtggcgtactggctgctgaagcgcgaagcaggctctctgccgttactgcgcctgcagcaaggattacacctgtcgctgttctggatggtggtgtttgcgctgggttatgaagttttttggcgcacgatgcgcttgccgtggggtatggatgaatggcagctgggcctgcaaatgggcttcctctccctgatcatcttggctacacatggtgcgctgcgcaaaggatgctggccgtttgccgaacatcgtcaactgtatggggcgattgccctggccccattggcggcgttggctctgctgctgttgctggtaggcaacgtgtttgatggggtcagtataggctggcgttatttaccgttgttgaacccgttggaagagggggctggttttgcactcttggctctggtgactctggggctgtttgtccggcgggaatacccgcaatttgccgcattgctgaaactggcgctgccgctgttcaccctcgcgatgctgttctggtggggcaatggggcggtcctgcgtgcgctggcctattacgccgatattgcctggcgggccgatacgctctggggctcccgtctggtgcagactaccttcgctttgctgtggatgctgatagcgctaatcgtcatggtgtggtcaaccctccgtggacaacgtgaggtctggtttggcggtgcggcgttgctcggtatcgtcattgttaaactgatgctggtggatagcgcccggggtggtggattggctcgtgccatcgcgtttatcggcgtggcgatactggtgttgatcgtgggatatttttccccattgccacccaaagcggtgcgcggtaaggaacccaatgtggcaagcgaacgagggaatgtatgaaagtaaaattgaataacgggttgctgctgtggtcactttgtctggctggtgtagccaatgcgcagccggtggctgaaaaaccgcaggatttcgcctatggcatctcgctagccactgaaggcagcgcgccgtttttccgtattgaactgcctgaggcggtgtataccgagagcgtttggccagatctgcgcgatgtgcgtgtgttcaacaatcaggggcaggctgtcccctttgcgctggccgcgaacgtcaccactcaggagaatagccagactttccctctgcgcctgttcccaatgaatggcaaaagggtcaccaatcaggaacagcaggtgatttcgttaaaatccgcaggtggtgttgaagtgaccttgccagtggatagtgacaagccaatggggaacacctatctgctggagatcccgcagcatgagggcaactatccccgcctgacccagctgaaactggcctgggagcgtctgcccgagaattggcagacccgcgttagcctgttttatagcagcgatttaaaagactggtcgagcagcgctgaggatgtgcccttgatggatctggtctccggcagcgatcggttgctgttggataccatcgatcttgatgactattccagacctcgttatctgctattggtgttcaatgatgccaaaacggcccctgatttgaagatccagtcagtacaggggattgcggcctccagacacaccgaacagcaaaggatcggcctgaccttcaaccaaaaagccatttcggccagtgaggctgaatatagctggccgaatcctcagcccttgaacaatatcagcattcggccgacgcaagggaatacggtgctgccactcgagatcgattaccgcagcgtagccagtgacaattggcaccctctgaccaagcaggtggtgttctcggtgaatggccgcaccgcagaggcaatcccgctgaatggcttactggtgcagggtattcgtttgaaaggcatcaaccagcaatggggcgattcgctgccagaggttaaggcggagcgcgatagccaaaccttgatattcaatgcccagggaaccacaccattcctgctggcgtggggaaataaagcggcccagcctcaggcgatccctttagatagcctgatcccggcagagctgcgtaaagcgatagatgccgatgcattgccacaggccgggttgcaatctcaagtgaccctgggcggcaccgagcgcttgagcgcggtggatgccgcagaagaggccagcatgtggaagaaaggcctgctctggctcctgctggttctaggggcgggtggtttggtgttgctggccttgaagctgtggaaagaggttcagcagaagccgtaatagggcaggtgattgttgattgatgggatgaaagacaaggggtgacgcagtttgcgttgccccttgtgcatttatagatatagaagcgccctataggctaaggcgctatccagtaaagatggtgcccattgttcgtaggtaggatcagttttacctcaggtgggtctgatttatattgatgtatgggcatttttacttcggtactaatagctaaataccataataaaaccactgaaaattaataacctgccattgattaaagtaactgggttatgatttaaagagtattctaataaattcttatatattcagtatttccagtcggtggatattcggttgcccgttataggtattgatttcattaactaataatgttgaccgatatagatatcatggctattctttgcttcctactcattgctgatgaagtggtgtaagcagtctgctccctgaaatcgtatgctgcatttaggatgcggccacgaccagtagcttaacgggagaatcgctcgggtatgtaaaacggttttgtcttactgcttaattattatggtgttatggaaaaggataattccctgatgctctatttgtcgctgagtatcgctattagatttaaaaaaataatagcgtgcactctaatgtcatggttgctttctgcctatgataataagaatgatctgttgatccagggggatgtcgagggggaatttatgtatattgccgccccagcctctggtatgctaaaaaatctctatgtcaaaaaaggcgatcgaattcaatcggatgctttattgtttgctttggataatgaacgtgaaacccagcgctacttacaggtgcagcatcagttagatatagaacaatccacgcttgtggatttacagtctggtagaagaaaaacggaattagatgttctgcgagcccagctcaacggtgccattattgcaacgcggctcgcccattcaaaactggcacgtaatgaaaaacaggcaaaatgcggggctatttctgagtttgaactggaagcctaccgctcggactataatcaaaaagcagcggtagttgaggagttacaaaatcgcctttccgctgatgaactcccctcccgcgatgctcaacaacgggctcaaacagcccgtattgaagcggcaaagtcggtgcttaatcaaagcaagtgggcactggatcaaatgacacgcgcttccttggtaaacgcgcaagtatttgacactttttatcaggtcggggagtgggttccggcggttggaagcagcggttggcactctccgccagcctgctgcataacccgaaactcttgttgctggaagaacccaccgcaggggttgaccctaacgcccggcaggagttttggcaaatgttgtatgcgctacataattccggttatttctcttttaaaacggaattggccacggagcaacaggcggcagaggcgttggcacagggaaaagtacagtttgttattaatttcccctctgactttagtcataaattattgcgcggtgaaaaagccagtatgctgaatgaggctgacgccaccgatccggtagccattattcaaccgctgatggtcgcgaatatgctgtcggaacgggtgttaaacagaaacttgcctgaagctgcgctgttcgcttttgctaaaaaccagttgcagtcaatgcagctcactttcttctattttttaccttcggtgttgttgaccggatttatgttcccgttccgggggatgccagagtgggcgcaggttgttggttgttttttacctatgacctattttctccggctggcccgtggcgtgatcctgaagggtaacaccatctttgagatggggtcagatgtttggccgctgatcggatttacctgcggatttatgctcataggcctctatttccaccaccgcactcttgattaattaataccgctatcccgatttcaaaacccgatggaagtgatttatgaaagataatggattatatgaaaagccgctggtatggcgctttatgctatgggtacacgagcgttttccactgccgaatgcccccttctttgttctgctgtttattgtcgcgtatgccgtggcggcaagttcagaaaagagggaggtgattttctcatggaatattattataggctgcctactatcctggtcctattttctgctgttgcgaatttttgacgagcataaggattatctcatcgattgtgagcaccatcctcagcgggttcttcaacggggattgattacgctcaaacatcttaaatttgtcggtgcaggttgtattgcactacagcttttcgccagtatggccattgatgggggtatcgctggggcgaccttggcgtgggtgctgctattcgcctggacatgcctgatgggtaaagagttctttattggtcagtggctcaatcaatacctgacctgttatgccatctcccatatgttggtgatgccgttaatcatctggtggctggccaatatagcggttcctggcgttacgctcaacgctccgatgcaaatattgatgcttctctcttttactgcgggatttattttcgaaatcactcgtaaatttaaaggcccggatgaagataggcaagagatccctacctactcctcaatttatgggataaaaaccatttttatcattctgaacatactgatttctgtgatgctgctcatccagctagggttgattatggcgactatcgggaatgttcctttcttatccctgatcccgttagtgattttctatattttaactctgtatcagctcgttacgtttttacatcacccctatattcgcaaccgaaagcgcaatgaagccattgttggcctctacctggccgttggttatctggtgtgtgcaataacgattttcacctccataatcgtttgatatttaagggtattatcatgtcgataaaaggtctgtcaccacgtcatctgtatacctatacggaaaaagcccggcagcagcgtttagcctatctgtcaaagcacatgcagtgttcgctggataaggttgcccagaactcgtttgatgccaccgcgctatccaacaacattgaagggtttattggctcgggggaagtccctgtaggtattggtggcccgctgcaaatcaacgggctgcacgctcaggggctgttctacgccccgtttgcgacaacggaaggggcattgatcgcttctatttcacggggcgccacggcgattacccgttctggcggtgccatggccagggtgctgggccagcgtatgatgcgtgtgccacactttgaatttctcagtgtgacagaggcgctggagttcagtcattgggtagtcaactatctcgatgagttacgcagcgaaatttccagccactctcgttatgcgcagttggtggccttaacacctcagattatcgggcgcagtgtacacctacactttatctatgaaacaggtgctgccgccgggcagaatatgacgacaacctgcacctggcatgtctgccggtggatccaggagaagctggcgacgaccactgatcttaagcctcatcactttatgatcgatggtaatttatccagcgataagaaagtctcttatcagtcgctgatccacggccggggtacgcgggtgattgccgaggtgtacctgagtgccagagtgtgtcaatccatcctgcgggtcactcctgttcagttagttaatgcttaccaccgtgctgtggaaggcgccatagctgccggtatggtcggtgtgaatatcaacgttgctaatgttattgcggcactgtttactgccctagggcaggatattgcctgcatccatgaatcttccgtagctcatttacgcatggagctgaacaacgagggggcgctttattgcagcatcacattgccttctctggtcataggtaccgttggcggcggcacttatctccctcatcagcgtgaatgtttgaacatgttaggctgtagtgggccggacggtaccagcaagctggcggaaattattgccagctattgccttgccctggatatttccacgctgtccgctatcgcggcagatgaatttgccaaatcccatgagaagctggggcgcaaccgcccacaccttgccgccgctcccaccacattggcggagctcaatctcgctttcttccactccgcatcctataacccggtctggggcagtaaactgccggtatccgctgctatatcggcaggttcagacgaaaaatacagtctgttgaccaccctcagcgcccaacattcgaacaggctgatggggctgtttcccggtactttgaccaatgcggcacggcaggatattccggtgatgctgaagctcaagcctctggatcaagacatcttcactatgatgaagttttttgccgggaaaagttcaccggctctgcttcaggctctttcggatgcgacacacctgatagagtttgttaacacccacagccgcgaagtggcggtaatgaatcagcaggatccacgcctgacacggtatatgccaaaggtttatggtgttattcgtgatgacaaaacgcgcacctatgccttgattgaagagcacctctacgatttagtgctgatggattccaccaacggcatcggcttatggcaaccccgccatattgaagtggccatcgcgggtattgcagaaatccatgccgtttggctggggcaggagggcgcgctgttacagcaattccctgaaatctgcctgcagggcaaagagaacactctggcgcaacggcccctgctacaggcatttgcgggttttatggcccaaaacgtagcccactactttaccccgtcagagcatgattatttcttgtcatggatagccagcatagaaatctggtgcagcgaaatagagcagatgccacgcacgctggtacataacgattttaatccgcgcaatattgccttccggcagtgtgatgagcggctggatctatgctgctgggattgggaactggccacgctgcacctgcctcagcgggatctggtcgagctgttggttttcacgcagcaggcagatattagcgctgagacggtggcgcactacctcgaatttcatcgccagcagttagagcaccatagccaaagcgctgttgatgccattcagtggcagagaggttatgtgctggcgctgcatgatttttggctacggcgtattccattctatttaatggcacaccacgtcagcccctatccgtttatcgatcgagctatgcagaccctgcgcaaacttattgaactgacacgagctcatagcaccacttaattcattttagccaaggagaggcgtgcaagattggtcagaagttcttctgttgggcaactgacccgatctgatcgctcaaatggactctatgacaaacttatactctcagcatcaggccgtacaattaactctggatcaattgggcggaaaagccgccaatcttttatggttatcgttggaacagtatcccgtaccagaatggtgggtggtgccaagcgatatccttactcaactggtcactcaggatccggttactgccgaaatggtgcagcggttaactaccgtcacagcggatatcacctttgaggcactggaagagctagccaccccgttgcgacaacggatacagcaggcacagttgcctgcgggtctacgaaaacccctgtcggcactgttggcggactatcccgatactttcttttctgttcgttcgtcagccattggtgaagatgcggataatgcctcttttgccgggcagatggacagctatctgttccagcagggggttgaagcgattagcgcaagcatttgtgccgtgatggcttctgcttttaatacccgggcactgcaatatcgactgcacaggggaatacctgtggataatatccgcagtgccgtcattattcagaaaatggtggacggtgaggtttccggcgtgatgtttactgcaaatccggtgacagggagccgccagcatggattgatctcctcagcctggggtgtcggtgaaggggtggtttctggtgaatgtgatacggatgagtttagtgtccatctgttcaaggatgagattgagcgccgtattgtcgaaaagcgcgttgcgtcagtgtttgataaaacccgtcagcggggtacggtcactcagaatattgatcaagccagccagtgggccgaaacgctcaccgatgtacaaatttatgcgttacgggatataggtaatagcattgcccaccactgcggttgcccgcaggatattgagtggaccattaaagaccagttgctctatattttacaaactcgtccgattacccgcctgccgaaagtcgccgaaccggttgaccgctgtctggtgtttaacaacgccaatattcaggaatcctattgtggggtaaccacgccgttgacgttctcgtttgccagagccgcctatgcgacggtatatgagcaaaccctacgtattcttggctgttctgataagcaagttagccagtctcaggagatgttagataacatgctggggctgattaaagggcgggtttattacaatatcaataactggtatcgctgcctgctgatactgccatcattcaaaaccaacaagcaggatatggaacggatgatggggctgacggaacaggtggattttgtccaaaccagacagttcaccctgtgggagaaagcggccaaactgccgggcatggtgaaggctttggttcgcctgctggcttcgtttcgcaatatggataaccacgttgaacagtttttacagcagttcggcaccctcacggcaaacattccgcgcgaccgcctgcatacgctcacggcgaaccaactgacagaactgcttaagtatctggatacacacttgctacggcgctggactacgccgatcctcaatgacttttacgtcatgatgtacaacgggcgggtatatcgtactttggcagcagcgggagttgaaaaaaccgctgccctgatgggggatttactctctggagaagagggtattgaaagtactcagccgaccaaagaactgttggtcatgtgccagtacgtccgctctaaacccgccttgcgtaaacttattgaacaggggcagagtgccacgctgctaaaccagctcaagacccaagacgctcatttctaccggcagtgtattggctatatcgataaatatggcgatcgcaccatgggcgaaatgaagctggaaaccttaacgcttcgctacgatccccgctttctgttcaccatcctgaaaaactacctgacgctggacgacttaacgccagaatcactggctaccagagaacgaggattgcgcagcgaagcggaaaagcgtgcttttagcatcgtggagtacgagctgggcaagcgtcgcatacggcagtttaaacgacatctggccaggcttcgtcaggctatccgtcatcgggaaaatatgcgctttacccgtacaaggttgctcgggatttatcgcgatctgtttaatcagcttggccgacagtatgctcaggaaggcattctctctcaggcccgtgacatcttttatctcacgctggatgagatctatagtggctatgaaggaaccgccgttcaaacccagttaaaaccgctggttggagcccgccaacgggaatatgccagctatgaagcggaagaactggcccatcacatctgttgtcatggctccctgtttcagaagcataactttgccaacccttcccaggtggaagcactcccatcagatgaaaatcaactgcagggtatcggctgctatcccgggatcgtggaggccagcgtacgcttaatcaaatctcccgaagatgagatgtcactatctgggcagatcctttgtaccgagcgaaccgatcccggttgggcgccgctgttcccaacggcgggcgggttgttgatagaacggggatctacgttgtcacactctgccgtggtggcaagggagatggggatccccgccattgtcggtattcccaatatcactcgcttgattcgcgacggtgagtatgtgcgtatggatggtggggcaggtacggtgacacgtctggaaccgtttaaaaaggacgcatgtgtagacgcggaggaggttctaccatgattaacgtctctgaatggcagccaagccagcagctaaccgaggagtttctgtctctcccgcagcaaatctatcgccacgatcctctctggccgggagaagatcaagcggtactcaaacagcagttcagccaggaaaactcatggtttgaacaaggtaaggcttggactagcactataccgggaaaggctcgcctggcgggttttctccctccctatttggttgaaggacagaaggtagcgttttttggtttctgggaaagcattaacgacttgtcctgcaatcaacacctgttcaacgccctggcggtgtgggtaaaaaagtacggtattactcagctgtacgggccgatcaatttttccacttttggtcagtaccgcattcgcctgaatcagtttgaaaagggggctttcgctggggagccttacaatccaccttactatggcactttactggaacagttagggttcagcgttaagcaccgttatctctcgactttcgatgatgccagtttggcggcggataactggtcacagcgatacctgcggatgaaaaaactccccatggatatcgaaagtcgtccgctgactccggctttatggatgcgagagcaacgccgagtgtttgcatttaccgatcgtctgtttggtgatggcttcgcttacaccccgctaaagtgggatgagtttcagcaacgttgtggtgagcactttatccggcgcttttgcccccattcctctatgttggctcaaaccacggatggagagattgccggtttgtccatggtgcttccggtctatcgggacggtaaagcagaggccaatttgtggaaaaccgtagcgatagatccccgctatcggcgtactggtgtgcttggccatctgtgtggtcagtatcttcaatatactagccaacattatccccgcgcgggtggggcgatgatgcgtgatgataatgccagcctgctcatggccaaatcgctgtttagaggaaccgatcggcgtcatcacgactacgcgctgtatggcaaggagctattctgatgaacctttgtcagctcatcgttcagtctgctgaacgctatcccgacagggtcgcgctcaatgttccgctatccaacggcgagtattccactctgacctatcgggactttatcaatctggcaggacattttcagcgtcagctgatccagtccggttttacccgtggcgatcgtctggtgttgatgatccccccaggcctgtatctctatcctttgctggtggctatgctgggaatagggattgttgccgttatgccggagagggggctcactagagcgcagtttcgggcgacgctgaggcactgtcggcccaaggccatcattaccgtagcagcaactggcaagtggtggccgctgctccccgagctttggtggttaaagcgatttgtggttggtcatccggtgctgggtatgcagcaactacaggtcagcgttaatgcgccggatggcggttttatctgtcaatcgctgacacctgatgccaccgggctgattacctttacttcgggtactaccgggatccccaaaggggcaaatcgtactcatggtagcctgatggagcaacagcgcgccctcgaaagcatgatgcttacaacagatcatgatattgatttatatagttttcccgtgcttgttttgcagacgttgagcatggggcaacagagcattctgccctactttgacttcgccagaccggcttgcgttaatcctgctgatgttattcaacaaattggccactttggtgtcacgcgcatcagtggtgcgcccgcctatatgcagagaatcattcgttatgctcaggcacggcggctgaccttttctaaggtacgccaaatcattattggtggtgctccgggcagtaaagctctttatcagagctgcctacaggtttttcctttggcgcagcaactggtgatttatggctcaacggaagcagagccgattgcctgtgtcgatatacaaaccttaacggatcgttggtcgcagtatgatggctacctggtcggcaagccgatcaaggttgcggaaatctgtctgcgggacatcatgcctaacggagaaccggggacgctaaagccacccattcccggtgatattggtgagatcctggtagccggtccccatgtattgtctgaatatattgataatccgcaggcaacccggcggtacaaaattccgcgtaaacagggtggcatttggcactgtaccggggatgtggggcacttcgataatggtgggcaaatatggttattaggcagagttaatgacagcattgccattgatcaacaccgggtaatttatccttatattattgaaaaaagggttaatgacctcaaggaaatagaacgttgtgctttggtcgctcatccgcaaggcaatgcggccctgatcctgcaatgcaccagcctaccgcaagagttaccggcaattctggcagagctccagcttacagacgtcacccaagtttaccaattatcggagatgcctgttgacgttcggcataacagcaaaattaaccgtctgaagctgaaaagtttactggcaaaaaacgcgttaacggtatgcaggctgaacagggcgtctttatgaataagtctcctttcctggtacgtttaagttctgccgattgtattacgctggttgggctactttttagtgccgttgcaatggggtgcgccctgcacaaacaattatttttatcggttgcctggttgtttctcgccatgctcgcggatgcacttgatggcatctgggctcgccgtaataagctggttcgcgcctttggacgctatcttgatggttttatggatcagttgatctacctgatttcacccgcagtagtgttctacctttcaggttttgatggttactggtcgctatttttactgttgatgatggcctgcggttctatccggctttcggtgtttaatgacgtcggtaatatagaaggaaacagcgggctttcttaccccggtatgccggtattctggagcttgtttatccttggtacctatttgctgttgcgcctggtgctaccaccgctgccaggttatctgctgctcagcgttgcgctgctgttgtttagcatagccatgctgtggcggcgaccgttttataagtttaaacatctgagcatcattatattgattaccctgtctggtgccttcagcttcgctttactccatttcagaggcttctatgtggtatgacatgttatatacctggtatctgatgatccccgtcatattgggaggctgtacccatatgataattgtcaggtataaccactttgcggctttgaatgttcctttggcggtttcctgctttggtgcgaataaaacatggcgtgggttgctgctggttcctctgttaaccgcactgtttgctcttttatggctccccattggtcagcttcattcaccacaggaaatattaccgatactgattgaggagtgctgccttgccggactgcttgccggggttggctatattctgccagagttgcctaactcgtggatgaaaagaaaattgggcattccaccgggcaagctgccggttcgcaaccgtgccttttttatcttcggcgatcagatagattcggctattggcgtgacgctggtctataccctctattttaagttgcctgcaacgtcagccgcgctgatcttcattattttcttgttgagtgcttttgtggtgaaacaactgttgtatttactggcgttgaaaaagacgaggttttaggctgatgtaaatggtttttatccaggtgtagtgagttaaagttgtgatctcgccgataactgattagttatctggctgaatgccatgtggaatttattcttaatgggcatttatcgcgtttggaggtaagcgtatctggcaactatagccttatgatgcaattggtgagcgacattttgccagattaacgagcaaggcctacagctttagcctgaacctgattttgtttgagttgctgctcaattttttgtacagaaacgcctgtttcgatagcggttgaactggcaacggcacggtagatttgagttttagtgatnnnnnnnnnntcatggtttcagtactgatgctagttcggatagttatagctcgcaaggcagatattagtcggtaatgtttcagataagatttgagtttgcagaatattaattaaatgaaatcgctcaccattttgcctcactggggggacgaaaagggggcaccggttgatacgccaacaaaaaagccacctcgtgagaagtggcttaattatatgaatttaaagctaaaatttggtggcccctactggacttgaaccagtgaccaagcgattatgagtcataaaattggcatgttttgaattgttcggcactgactctatttgtatttttaattgtctataatcaatcagttatggtgttgttgttgtttctgtttggttgcctgatatcctagttgtatcatccttacctgacccattacctgacccaaaatgggcatcgggtcaggtaacgcttatccttagaaaggtaaactcatggccgctaatcttaccgagactgctatacgtggattgaaaacaaaaagtacgtcgtactacgtgtggagcaacagcgctcaacgtggcaccggcaggcttggtgttaaggttcagccttcaggcagcaaggttttttatttccgttactacgttgataaagggaagaaagagaaattcatccagttgggcatctggcctgagatgaaactggtgaccgccaacgagctggcgaaaaagtatggtgcctggcttgttgaaggaaaagaaccccagcaagagcttgagcaacaacgcttggcggaacagcacatcatgcagctccatcgttctcaggggtcgtttgaagagctggtgcatggctacgttaacaaaatgaagctcgataacaagcggacttgggctgatgtattgaagcgcatggagagagagtgctacagcgttattcctcgtgataccaaagcgaaggacgtgacgcctctgcagatcaaaactatcctctcgggcattatccagcgtgatgcggtggtccatgcgaatcggattcgttcctatctgatggcggcatttaattacggtctgaaggccgataacgatccgatgaataccagcgtggggattacgttcggtcttgaagttaatccagtatcggccatcccgaagcaatcagcggcggaaaaagtcggtgatacttggttaacgctggaagagctgcgttttgtcatggaacatttctccgaggcgactggagtgggtcccttgatgcaacacttaatccgtttctgtacttacgttggtgggcagcgtccgtttgaaatgattgccagccaatggagtgcgattgactggcagcaaaagacgcttctggtcattgccgatgtatcgaaaaacaaacgtgagcatctaattccgctgactgaatcggcattacgtgaattagcctctgttaaagagctgactaaggaaagtggtagcccctatatcttcccactctcgaccaacggcaaacgaccggtacgtaccgatagcctggcgcgttccatcatgtatttccgggcctttaatcctgagtttaaagttttcacggcacgagatttacgtcgcacctgtaaaacgctgatgggggaggcgggaatcagtaaagagatccgcgaccgtattcagaatcacgctttgaacgacgtcagctcgaaacactatgaccgttatgattacctgacagaaaagcgcagagcgcttgaaatctgggaagatcgagttaatagctatcaaagagagcaagaaaacaacgttgtgaacttgtttgggcggaggtaagtgcttgtcaaaatacgagcttaattcagtggaagagcggtatcagccgggctctggagacctggtgctggctaataagttagggatcactgatgaagaggaaatggaggctctggaatctggcctgttgctgatgctttatgaacagctatttatcgaaggccagccgcctgctgcattggcattagagcatatcagtgggtggcatcgtcaatggctggggaatgtgtatgactgggcagggagacagcgtaacgctaacctcactaaggatggcttccagtttgctgctgccgacaggattccgctgcttcttgatggttttgagaggcagtttctctcccgatctggtgaactgaaattcctggctcgcccggagctggttagttatctggctgaatgtcacgtggagtttattttgatccacccattcagagaaggtaacgggcgtctgtcgcgactgctttgcgatgtgttgtcggttctggcggggaaggggttactggattacagcttatgggatgagcacaaggcattttacttcaaggcaatacaggcgggtgtctcagggaactacggccctatgatgcaattggtgagcgatatcttgccagattaacgggcgaggccaacggctttcgcctgtgcctggttttgtttcagttgctgctcaattttttgcacagaaacaccagtttctatcgcggttgagctggcaacggcgcggtagatttgagttttagtgatctgactatgtgctgttttttttgtcatgtggaaagcctcgttgattcagacctgattctagttcgtacagggggggctagcaaggctgttatctgttctccaaatgcataattcagccgttggttatctgaggtggtcggagaggtgaatttggagttgtactaatttttgaccaagatcacatcctcttcattatcataagtgatgttaaagatgatttgatttattattcaataagttaatgcattcttaatggtgggtttgatgaactctaattttgtttctttatcaaaagtttcagatgagacggttgtcgagaaaattcttgatgagtggttcgctaagaaaatagatttatttttgtattttggcggtaatggaaaaaaatgtcggttatcaagatgcatttcgccatccttacacataatgggcgagaaactcatcagcgatggagacgagttctatatatcagcagacagcccagcccattcatttttgaaatttatccccgatttaccattaagtcctcacttaaccgttagtgaaggtttcaaaatttcaaggtctattaagggtaaatattttaattatgaatattctggggtggcattgggatattggaaaattgttcctactcagctatccagattcaataacggtaaatatatccttaaagataaaggaacattaaatatccaggatgacaatgtaggggctgtatatgtttatagtttatacgatgaagactatctagtctttaatgagggcatttttgctggaaatgatgatttatatatagaaataagtgtgcttgaattgttcgaatcttctgtaagtgctaagagtctagatttgacttcagatgatgaagagccattgaaaagaaagtacgcgacaaagaaatataattttgcactctgtttagccatgcgaaaggttgttgtagaaagtgatggcattccaattgtcagtaagcttaaactagattacgacgatatgtggaaagcgaatatttcagaaagtacactatgtgaatggtttgtaaaacctgaaccatatacagataaaaggcaaagatttaccttagaaaaaaggaaggggatgtatttatttctttcactcttttgtaggaaaaataagattaaaaataccaaaggaaaggcatctgccatcgctgccgaactcaacaaaatggctgctcaggagcctttctgtttcgacgttgagttcactgcagacgatgttaaaccatggctggaagagcctaagctaacgtcttagtaagagcttatccaaaagcgtgttccttcccaattcatccgctctgacacatgattgtctccatcgaaacaacaggaggcaatcatgaacaaatcttttactcaacctaccgctgaacaacgtctacaggctctgcagaattatggcgagccgtcagatcgcttggtacgcgaacaagagcgtcagcgcattacatccattgctcgttccactgcgtggaagcttgagcaagctggaaaatttcctttgcgtaaagctcttggggcaaagtcctgcggctggctgctgagcgacttacttttttggattagcatccgatgatgttatctgaaaccttagcaagttattggctatttcgccaatactcatggagaccaatatgaaggtggctggataactaaatttgaaacattgtttaatattacaacgaggctcttatgtcacaaaaaatcactttctccactaattacgaatcaaccattgaagcttataaggagtacagtaaaaatgcagggtgttcactctccgcgactatttcgaaagtgttgcatgctgctgcaccatcttttttgaaaaaacaaattccatttattgatggagaatctaaaaaaacagatgcagagttttttctggatgtttgaaagtctcatattttaatgtctggagatgttctagatgtgacagatataaaaaacagtctaccagatcagagaatgagtaatcttgaaaaagaggaaattaaaaagacgttaagaaactgcattaaagatactgaggtgaaaaatgctatttatatttacacggatcgaaaggtgaattatgcaaaacgattggcaactgggcttgctactatccagttgatcaaagataccatgtatgaaggcaatttttttgatcttagcagggttgtattacttcctgctattgagttaattgaatgtggaatagatagagttctcaaaaagcactctgtaaacaccttgtttccgcatatttgttggattccgatattttacataaacgataaggcggtgatgatcccagtgattcgcgaacgtgacgttccatcctccacaaaatcaggaggcaatattattatcattaatccgtttgctgattaggacggaagttaatttctggcaccaatagtaagtgtaatgacattatatattctgttggtgctatcatttgtcaaatgacgcaattggtaaataatttgacatttgattagacgacaacaaaaagttaaatcgcatcgttacttgggtgtttatagacatgctcaggtagcgataattaataactgataccggagttaagcagaatgtctagatttctttaccatctataccggaatgcgaaggaagttgaggatcagaatcttaagttggagattgaagacgttcgtaaagctttatcgataagttcggaacggacactgattgacagtcaaccgtcacccaacaaatcgaatgctttgaaaatccttatcaaccgagggatgggtagaggcgacgatctggttgtattagacctaaatagtttggggatcaacgcagaggaaatccaggagaacataatacgatgcgctaaaaaggctatacgcattcattgttacttccctcaaaagaagctaaccccgacttctgatggatatgtttttactttattacttccaaagatacaaaatgaatgcaggaaggtaaatttctcggcattgaagactagaaatatcactaggccactaggaagaagagagggaagcaaatatcgtgaaagcatcgagctagctaaacgcagagggctgactcaatcacaaacagcaaaagaactggatataagcatatcgacagttaaacgtaactggaacagcggaattatcggttaataattcatacctaaatacagcctgtaattgctgttatcccagttgctgtataagtcatctggaataaaaataacttcagagtaattttattaattattaggaggttaaacaaagcactaaagcaaggtgtattgcaccttctgcttgcctgaataaggcgcggtatcaatctcatgagagcggtatatgtattattatacctagttcagttaggggaacatctcagtaaaactactaaatgcaggcatcctgtcatatgggtagcgtaatggctacccattacttgatagtaataatacaaatacagctaatggtatattatgaaatcaccttatgaattaaccgagaaagaatttgaattaatggcaaagacagcagagaagaaatataaatcatctatggaacgttatattctccgtaaatcttttgctgtagtatgtaacacccttgaacacaataatcgtatatttgctttccgtgcagacctaaggtttgctgaggatcacgtatctgacgatcctgactcacctgttaggtatcagagggtagatccgcaggcaataactcgctgcatcgagtcgctgaaaagccagttacgggaggatcacagacgttcaggcaggccgggaaagcctgtgttacccgcttatgtctgggctagagagcgtgatacaagcgaacatccccactatcacttgatgctgttgttcaagcggaacgtttacggatatctgggaaattatactaatcgcaatgcagataatatggcaacgaggatacagaaagcttggtgtagcgctgtgggccttgattatccatactacgctaccttagcgcatttcccaaagaatcagtcatttaagtttgacagatgcgatgctctaacttgctcccctgtttatggggacttcctgttgcgtctagcttatctggctaaagaaaatacaaaagatgtccaccacggctaccgtaactttggcacgagcctgttaaagtaggctacggtgaggacggtgtaggctgttccgtgcaactcgacggtagccttctctgcgtgagaaggctaccgtgacatttagatttactattcaagatctctgatttatcaaagccctgaattttgggtaagggtcaaagacacggggcagcaagcaaggcataatgcagtaactctttactagaatggtttcacctgatatgagcactatcacacctcactaccgcaacgtgcaacagttattgcaaagccaatcgttttccatcgatgagtaccagcgagagtacaagtgggagaaggagaatattgacgagctactatctgacctacaaggcaaattcttcagttacaacaaactgggagatgaaaccagtgccgtcagcagttatggcgagtattttcttggttctatcattgtcagcaagcgcaacaacaaaaactacttgatcgatgggcaacagcgggtgacctccctgacattgttgttgatttgcctgtatcgagtcgccaaggaacaggggctgccggtagcccaaaccttggccccgctcattttcagtgacaacctcggtaatcccaagttcaacctcgatatctctgagcggttacctgttatcgatgccttattcaagggggaagcgtttaatccgaatggtaaggatgaatccatccaaaccatgtacgctcgttatagcgatattgaatcaaacgacctgatggcagaactaggagacgctctgccacatttcatttactggttgttgacgcgagtaggcttgatcgagattgccacggataacgataactatgcctacgccatttttgagacgatgaatgatcggggtaaaccgctgagtccggtagatatgttgaaggcctatttgttggctccgattgaagaacaggatgaacgactacaagccaatcaggtctggaagcagcaagtattggaattgatctcttggggaggagagcatgaaccggaacgtgatgccaactgtattaaggcctggttacgcgcacagtatgccgaaagcatccgtgaacgtaaggctggagcggtggataaagattgggaattgatcggttcggtctttcaccgctgggtgcgtgataacagcccccgtctgggattgggtaaagctcaagacaatcggaaaataatggctgtgaactttccatttttcgccaaggcataccgccgtatcctatactctagcaagcattacaccccgaagttacgggcgatctactacaacgcgcacaatgattttacttggcagaatacggtactgctggcttcgttgatagaaactgacaatgacgatacagtagatcgcaaactggcagtgacggctacctatttggacatctggttgatgcgtcgagtagtgaattacgtccgggttggatattctagtgtgtcctacgctatgtggctgttgtgtcgggagatcagacgcaaaacgctgccagaattgatagctatcctccaaaagaaactggcggatgatgatattacgttctctggctatgcggtaaaaggacgaacgggtatcaatggtttgggactcaatcagttcagtcgtcgctatatctatcatctgctggcacgactgacagaagcaaccgaggccggtgcaggacggaccgagacatttgatcgattggtgaaccgcgctctcaagaacccatttgatatcgaacatatctgggctgacgattacgaggctgtgaaagatcagttcagcactgagcaggaatttcaagattggcgcaataatgttgcgtcacttttgctcttgccagcagatgttaaccgaagcctgcaggacaaaccgtttcctctgaaacggatacactatgccaaacagaacttctacgctgcaagtctggattccagtgcttacgaacatcagccacagtttcagcagtttgcaacccaatacaggctgccgttcaaatttgccgaggtattcgataaggcagaacaacgggcgaggcgagagttgattgcggaattggttgaattaatttggtcaccgaatcgtttaagtgaggacgcccatgtatgatcaacctctacagaactcactatttgaggacgattacctgctgagggaacttgggcaggtggctcatgtgccgcaggttgctttgactgagctagttgccaatgcatgggatgcaggtgcgtcacgtgtagacttggttctacctaccgagataggtggaatactgactgtgacggatgatggtcacggtatgaccccagcgcaattcaaaaaacgctggatgactttgcgctacaagcgtgagaagtatcaagggttcaacgtcgagtttcctgcaggacgttcagctagaccgcgaaaggcttatggccggaatggcattggtcgccatggcttgctttgttttgctgacgaatatgaagtgaaaacttggcgcgatggcactctggcaaccttcgttgttggcacgggatcgggacctagtccttttgtatgccgtagtgaaacggaggaaaaacagactggcagcggtacccgattgcaggtgcaggtatcgcggaagctacctgatgctgatgaaatcctaaccgtgctatccgcccgcttcatccacgatccagagttcgaggtgcgtgttaatggcatgctgcgcccctttgctgagattgacgggcgtgtaagtgaggaaacgttatgcctcggtgcgggccgtaatgccaaggtgattgtcatcgactcaactcgcctgaatcattcctccctgcatcaggggatcgcattttgggtgcagcgcaggttagtcggtaccccatcatggacagttggacagatagccaattttgacggacgcactcgctttgcccggcgttacaaggtgatcgtggataccgagggctttgaatcagacgttgagcaagattggaccacctttcgtgccaccgatgccgtccgtgagttataccaggctacagctgagcacatttgtaaggttgcacaagagcttgcaatagaagtcattgaaaatacatcagaggatgctctgatgcagaaccgctcagagctagcaaccctaggtcagggggcaagattggaagtggctgaattcactaaggcgttagcccaagagcatccgacagtctccccagaattccttgccacagccgttaaggcgcttattcatcttgaaaagaccaaaagcggagccgcattactggaaaaactttcaacattgcagcacgacgacatagagggcttagaccggttactgactgaatggacagtcaaggatgcgttgcgggtccttgacgaaattgacagccgacttagcgtaatcgaaaccattcagcgcttggcggatgatccagaaacggatgagttgcacaccctacacccgttgatattacgttcacgttggttgtttggccccgaattcgaatcgcaggaatactgctcgaatatgacattacaaactgtagcccgagaactctttaaaagtacagaggcccaatttatcaatgagcgtaaccgcccagatattgtggttttgtctgaaaagacaacatggcagatgacgggcatcgaaacattcgacccagtagatctgaccctcgtaaaaatgcaacatgttttggtaattgaactaaagaaaggaggatttgaactaacacgaaaagaagtgaatcaagctgatggttatgtacaggacattgcatcatcgggtttgatgtcaggaacaccgtttattaacgcttgggttgttgggcaaaaagtagcggccggtgttgcccgcgagaagcttgtcggtgacggagagcgaaacccatatgggagagttcgggccacgacatttggttctctggttggaacagccaatgctcgattaatgaaactacgcaatgtcttagcagagcgatacgaaagtacatctacagataacttaattaatcgggtgttattccggcccgttcaaacagacctaaaaatttaaattaaagtggaaaagatttactccatctcaatagaaaaattatgtccatacaacgaagtcggcgttgttgaataaatagatattatgctgcgggcctgcaaaatggcggtcttccctaacgtaaaatcagtaggttaaagtcagaattgtgagtatctcacaattctgacaagcatatttgaccaaaataggccggtcaaaacagcatgattccctattattcaacaaagccaacgaagtctgttcgaaggcctccgtactgcgaccgccgaggtgaatatggtgcactactgtgcaacctgatcgggaagatgccgccttaacggcgttgttcctgaacgttatctataccatgtacttgacgtcatcaccgactggtcagcaaaccgcgttggcgaccttttactgtggcgagtaattcaaccaacctaatcaattcgacttcgtaaatacggttctgtctttacacttacagatggactagtacattgattctacccacgttatgtggacaccggcctaagcgaggttctggttttcaaattgttccgggctaagaccaccacaggcgcggtggcgacgccagcgattgtaatcgcactccatataattgaacacggctaaagcccgcatctggccttttgcgtcactgactactgaattacgcagcaactcatccagattgaagccttactagcgtcgtgtgacaaaggttcggaataggaatattctgaacaggcaactagaaaagcatagaacggtttgaaggtcattagtcagtctggatcgtatccaaaataattttagatagatattatctcattgaaataaatgaattattttacatgtctcgggggcttttatttttcacgctgagatctacgcatgaataaatctgaaggctttcaggccatagagaagccactagattctctgcctcatactatccgtagttacattcttgaataactacacaatctcacacattacgaaccgatggtctacattatgaggaatactaactcaggtaaaaaccataattcaaatcattgtttaaattgaatattattccattgaacaatgtcagcgtgcgaatcacatccgataaactgaacccagaatgtaacagtttctggatgctatcaaaggtatgaattttttgcttctcctgataaaatcacttgaactgaagtatagggatttctatgacaagtaacattatgaaaagacaaacatttgagaacataattgaaacgttgggtcaaccgttctacagagatgatcgaacagcactttatcatggtgactgcgttgaggttatgtctcaaattccccacaattcagtggatttaacaattacttcacctccttataacatcgggaaggcatatgaagaaatacaagatgttcataaatatgtcgagtggtgtgtgacttggttaaaaaatattcatgatattactacccaacatggtgcacttgcattaaatgttggttatttagaggtacctgacagaggctatgccgtgccaattccatatttattatgggataaaacccccttttattttcatcaagaaatcatatggaattatggagcaggtgttgcttctcgtaaacgtttgtcccctagaaacgaaaaggttctttggtttttaaaagaccaaaagaactatacatttaacttagatccaattagagatcctgatgtaaaatatccaaatcaaaagaaaaatggaaagcttaaatgtaatcctttaggaaaaaacccatccgatgtttggcaaatcgccaaggttacatcagggaaaaataggtcgtcacaagagagagcaccgcatccagcacagtttccattggagttaatcaatagattgatgaaaggattttcaaatgaagaggaaattgttctcgatccgtttctagggtcaggtacaactgcagaaagctcaatgaataatggccgttatgttattggcatagaaataaataaggaatatttactctatgccaaaaatagactacagcgtagaacagaagatatttcgctaacactagctcaacaaccattgctagtttagccatagagtgtgataaatttgttctgataagtatgggaggccaaacgggcctgctggcctgtactagaagactgcgcaatccagtctgtgtgggcaagccacccaaatcgaatttttaaaatttgtggggtggtgtttgcctgagagaaaggttggaaattaactgcaagataaaatccatctttaatttttccttctccattttgtggctgtgcataacttctattcccaaaaatctgactggaatttgaagaggttttcaactcgattgaaagagagttgtcatacttacaaactatatccttatcatttttattttcttcttttctccattgctgaggaaattgagcctcgatagcagctggaattaactcatgcagaatggcaccaatgatttgaggtttagggaaaatatccacaccaatttttagattatgcattccaaaggatgtattaaataaacctctccatgagtccatgaccaagctaaccaagtgcggagttaaaggatgattattaactaagtgtgaagtgagttcttgccattgagattcagggatatttaagtatcgattaacgttcatctctctttccttgttatgtgattattttttataattttatcatatttaaaatgaaaatcaaagagttatgatgcctatcactttaaaggcattgtttcagtatccttatagcactgggcacttgtcaaactcaacccccaacctagattacagacagcttcatatgcaaataatttcagacagatattatctccgtgaactccctgcatccttacaggatgcggggcttattatttttcacgctgagatctgtgtatgaaaaaatcagaaggtctgcaagccattgagaaaccgttagcgtcactcccacatgctatcggcaaacatattcttgaccatattcaaaagctcactcactacgaacctatcatcggcattatgggcaaaacaggggctggtaaaagtagtctgtgcaatgctctgtttcagggtgaggtcacgcccgtcagtgatatcaacgcctgcactcgtgatgtgcttcgattccgtctgaacagcggtgaccatagtctgatactggtagacctacccggtgtaggcgagagtgagcaacgggataaagaatatgaatatctgtatcgccgtattctccctgagctggatttaatcctgtgggttatcaaagccgatgatcgtgctttctccatcgatgatcgtttctaccggcgtgtgataactgactaccaacaacgggtgctgtttgtcgttacccaggctgacaaaatcgagccatgtcatgaatggaacgccaccagcaatgcaccatcaccgcaccagttggtaaatattgaagcaaggctgaactccattcgtcagttattttcaccacaccatcctgtgtgcgctgtctcagcgagaacagaatggaatctaccgtcaatggtcgaaaccatgatgcattgcctgcctgaccgtgccaccagctcattggcgacgcaattgcacgggaggttatgcagtgaaccggtaaaaaagcaggcgcgtgagggctttggcgatgcggtgggagaggtgtttgattctgctgaagcggcatcatttattcccgcgccactaaaagcggtcattcgtaccgtccgcgaggccgtggtatccgttgcccgtgccgtttgggactggattttcttctgagctggggcacctgccgttatcttcgggacataccctgtccgttatgacgttttataagctatcgaatttggtatgttttctctctaagccccgtcacagttgatttcggcaacagtaaaaaatacgtcttcttgtgtccattccctgtccctgcccctcgttaaaataactgttttattttcagctaattatcttactggagaacctgtctcatgactcaggctgaacgccgtcatgaccggcttgccgtcaggctgtcgttaattatcagccgtctggtggcgggcgaaacgctagatttgcgaacgttggcaactgaatttggcgtgtcggttcgtaccctgcgccgggactttcgggaacggctgatgtatctggatctagagtatcgcaagggtcagtatcgcttgctgtccggcggccgccagagagagctggctgtgatgacatttgcccgccagtcgggcgttgaagcactgtttcctggtatggataaccatctggtcgcttcactgttgagcggtcctggtgagtctccctgccttatctggcagggagtggcccaagcgtcatccccagactcgggcgtgttcacacgactggtgagcgcagtatcggaacaccggaaggtgacgctactgggaagcggttgtcgctgcacagacttcgctccctatcgcctggttctgcgtgagggagaatggtatctgacgggtgagcatcaggcccggattgccgtttttcccctgaccgatattcgggcggtcacgctccacaacggcagcttcgctccggatatagcgatgcgcgacatcctctctcacccggattttcttcaggctttaccccactttcgctttttccattcattgcttgtcgcaactgacggcgggcttatacctcagaaggaataatcacgatgaaattgcttaccactacagtgctggccgccagtttttgtcttggtgttgtgtttccggctgacgctggaaacaccgtcggcacagtcaaagcctggcaatacatgcaggctgacggttggaaatctgccgatggcatggatgacaataagctgcacaacatgctctatcaagccagcgtgattgataactacccgtggacgagacagtttctgctacgtgtccgtggcggcggtgccattttcctggccgacaagaaaacccacaccattcgccacctaaaactgaatcctgtcggtgaaacctacaacgatattgaaacggtttatcagggagaagataaaggtgaagggtgctattttgccattattgatagccagtcttctgtacgggataaggctattgatgaccttatttaccccacatggccagcggttcacgatactgatgatgttcttaaggctaaaattgcaaacgtcagacagcaaatagccgcgaaagtcgtcatggtcatgccggataactgtgtgaataaacagcaacaagcggcgctggcggctaaacgctcggaaaaggatcggaaactgcaggagtgggtggcacagcaaagcctcgctgaattgtgtcgtcgcaccggtaattgttgaaccacttcccgaaagaagagtaaatagaccagtaacgtcttcggtccgggcttctgatagctatcccactgaataatttctctgggcgactcagggggtttcacagataaggaaaatcatgttttcgcaaagccggggtggatactgcggcttttggcaagctggcctagctggtcccattttatctgtggcggcgggctaaaacgcttgggcagaaacccacgtatttctgggtctggttggtgatgttggtactgatcattctgacctgatgttaattaacgtctgacaagaatatatcaggggatacatggatttattacaaataatgcagattgcaaaaaattcaatttactgatttaaggacagaattatgcgtctacctcacgcagtgctgatggtgtcaactctggtgtcagcaacaaccgctcaggccataccgaatatgtggaccagtggttttggtcagggtgtaacagaatacctgatcaccaattcggaaaatgtcgtttttaaccttaactgcactatgaacccagatgagcaaaatatcttgcaacatcacgtgctcattgacctgcctgacggtactggtgcagattcacgcgatgataaaactgcaataacggttgtgaccgatgaccaacagtttccgttaccctcttcgctggggtggcgaaatggggacaacgcctggatccagtttattgatgcccttggtcacgccgcaacgttcgatgtttatgttaatgataaaaaagtagggagctttactcccggtattaagaatacgaaaaaagaactggatgaccttagcgggtgcaggaataccgctggttaactttctttatcagcaaccaatcgatcatcttacgggccatgcctccttcgggaagcatggcctttcgtttttaatctccgaataaggactttgtagtgttacgccagccagacctcgcgtgagccgtcaccataagcgctcactgacttttattacctccctccaacgtacaggcccctcggtttttccggtggggcctgttttgttatttatttcagaaggatatttttcatgaatacacattctaccccgcctgcggcctcctctcagacaaacacactgaccgccactgctgtgccaaaccgccagcgcctccgtttctggccacagcattttggaaacgtaccgcaatggctcattctggagcctcatgtctttggctggctggatcgcctgtgtgccgactatcacgggggttcctgggatttttacacgctcagtaacggcggggcctttatggctccagaaggcgttgagcggtggtcactgtttaacggtatgaatggtaacggtgccgagatgagtgctgaggccgcagggatcaccgcctgcctgatggccttcagccaccacgcttgccgcactgagagcgagacgatgaccgaccatttctatcgcctgcgggaatatgcgctgcatcaccccgacagccgcgccattttcgccctgattgactgagcaacaaggtactctcaccatgaagataacgttatccccaactgcggctgaaatgtcacctggcgaacaacgtaccatccgacgcgccctgaacctgctggcaaaacagttgcgggagcccggagtggcgttcacctccaccagcgtaacccgcgactggttgcgcctgcatctgaccgggctggaacgtgaaatattcgtcgtgctgtggctcgacaatcaaaaccgtctgctggctcaggagacgttgtttaccggcaccatcaacagtaccaccgttcacccccgtgagttggtgaagtctgccatgaagcacaatgcggcgagtgccgtactggcgcacaatcatccgtcccagttggccgagcccagtcaggctgatcgacaaatcaccgacagaataaagacggcccttgaattggttgatgtgagagtggtggatcacctggttgtgggtgggctcgatatcgtgtcatttgccgaacgtggctggctgtgaggaggacaaaatgatcaccactacaccgcttttgcgttttggtctgcaatgcagttcggcccatatcaccgaagacgacaacgtagtgctgtaccggatttctcattgtcacgatgagtttagtgacggtgagtggatctcgttctcgggcactggctatctgatccgtctggatgcgtggacccatccgatattgcaactcaaacggttgggactctccaaaccttgtcgccgtctggtcactaccctgatgaaacgctatcaactgacctacctgcatattgatgcgctgggtgaggtcttgcccggttttaccaccttcagttggtaatgactcgccacaccaagcctgtctcattctctcatccacgacacacaccagccttattgcgggacagtgtctatttcaaggaaacttaacgatgaccgatagtaaacctgataccccctcccagggggctgatatcaccccactagcctggggactaaaacgtatcatcacacctcagtttggtgctcgcctggtacagcaaggccaccaactgcattacctggcagaccgtgccgatatagtggggaagttcagtgatgccgagttgcgtcatctcgaccaagtattcccgctatggcttcagcagttggagtcgatgctgatgtcgggtgaactcaatccccgacaacaacactgcgtcacactccatgcgagcggactgacactcgaagccgatacgttgggctcctgcgggtacgtgtatatatctatctatccaacatcagctacaactgcataaaacggctttccctcacccaagtattcacgctttttccaaccttctatcaggataacaatcatgcaaactgtatcggttaccccgaaacgggcggcaccgtcttgcccatcacccatcgcgatctggcaggtattgctgacccatctattgcaacaacactatggtctgacactggaagataccgcctttagtcacgagggtgtgatccaagagcatcttaatgcagggatttccctggcggatgcactgaattttatcgtggaaaaatatgaactggtccgtattgatcgcaccggttttagtatccgtgaacaatcaccgtttattacgcctatcgatattctccgggcccgacaggctactggtctgatgaaacgccgaggttacaaggccatcactcatatcaccaacggtaaaaaccaacgacagggggcacatccgtgaagatcgacctgaatgttgaagtcgacagtatccaggtactggggctgaacatggggaagatagccgttgctgttgatggtatcgagttggatgcgttgatcaaggcggtcaataaccacggttattccctgcaaaaagccagtgaacctgaatacgataatgttgtatcgccttgctcattaacccttcaagccatgaaaaatcagccaacgcaataactcccgtaacgcacgatcccttcacaagcatcaacgctacccactgggtggcgtcttgtttttatccctatctgaaataaaagaaaacaaaattatgtcgacacttattcatgctgaacccgaagttttaaccggccataccgaagtgatttgttccaccagcattgaacgtatcgtcaccgggcgtaatgccgctctggcgcaaattgagtctattatccaccaacttgaagatatctcgaccatgaccagcagtattggcggtggagtggcaagagactgggctatgcgtcaggacttccgctgtggctgctggctgatgggaaaagtagaaaccgccatgcctgtgatcacccgcaatcttgatcgctacctatggcaagacctgatgaaaaaatcaggaatgctatcgatcatggatgctcaagcgcgtgaccagtggtaccgcaacctggagagcgatactatccctaccattagcgaagccaacatactcagtacctttgagcaactgcatcagagcaaagatgaggtctttgagcgtggggtgatcaacgtattcaagtcgctttcgtgggattacaagtcgaatcacccttgtcggtttggcaaaaaaattattgtgtccaatctggttagttacaaccaatggggatttacgctgaatcacagttacagacgggatcaactggcagatcttgaacggatgctgttcctgctagagggcaaggcgatcccggataaccggagggatgtcaccgctcggctatatgagcatatcagcgcccatcggcaaagggcggaagtttatgaagatgagtattttgcgataaaatattttatgaagggttcggcgcacctgacatttaagaaaccgacgttgattgataagatgaacgatatcattgccaaacattaccccagcgtattacctgagcgggtatgaaccagatttaaatgtatttgtgccactcgtaaaaagcttgcgccgtgcaccagagagaatcagatgttcttgccatcaccttaacctccgtcctaccgcgaccatattgcccactgtgtcgttagcaaacggcagatgaaaaagcgcaggctgaatatgttagtttgctgagcagcaacgatacttaaaagaagctgagggagaaaaggatattgccggtttgcttcagtggaaacccggcactaaaaagtagcctccaatgcctccaatgcctccagtttccacaagcaaaatcattttggggtaccaaccaaaatctaaaaagataaaactaagtaagttcaatatcaccagctatgaaatgcgactgtgttccggtaaagggtgaaaagacaccctttaccgttcgttcagatctctgtattaaaacttcagagggtcaaatttccggatcaggaatagcagtgataacgtattccgtattttttggatccttcgaatagaaccgggcgtttgtcaggtagagtctctcgccaaagcgtgcaagcgttgttggcgtatcaaaacgcggatcagctgtttctgagagtaatttgcctttagagccatcctggttaatgtgtaatacgatcagtttattagacgtatttcgtaccacatagagtgtctgcccctcaaggcgcatgccgtcactccagcttaaatctgctccctgaatatcgactggtgtggattttccattctcaggatcgacccggtaaagaatgcctgtattcgtttgtaccagaagcagagcctttccgtcaggtgtaggcgtgatgccgtttgcattccagccttggtcgccctcgccagcatacttcacaccgtcaagcggaatgatcttgatatcgcgctgatccggtagttgtccatcgctaggaagtggcactttgtagatcactggtgcgaacgagtcggtgacatagagattgccattgaggatcgtgaggtcgttgaccgctgttttgcgaaggtcttctgcgagtctgtattttttcaacacattacccgtgtttgagtcgatcacgcgtagatctccccccataccgccagcaatgaacaggcgtccgttgttgtccagcaggatgccgattgccccttgaccacttcctttagtaagaacggttcgctgtccagtccttaggtcgaagcgaaagatcgtaccgtcaacatacgatgtcacgaaagcttgggttcctttgattacgatcccttccggacgctggcccgtgggcagcgaaagggtcgtgggccacagggacgatgagacttgccctggcgaagcgatttttgtttcagcgcaggcagcattgctgattaaagccgccaagctaacggcagaaacggcgcggataagacaggatttaagattctttgattccataataatatactctttggggattaccctagcttggataagtaagctcatgttgatctacttagtgagctttgaagacaccattatcttttacaaactaattgggataaatagtgtaaaatggaaatgacttttccatttttgggataatcagatgaagttgctgaacgatatgtacttatttgttgaggtagccaaggcgatgagctttagcagagcggcagaatcaatgaagattcccagctcaaccctgtcaagacggataagttcacttgaaaatgaaattggtctgaggcttttacatagaacgacccgaaaactggaactgacagaggccggacaaatttattaccagcgctgccgtcgtattgtggaagaggcgcaactggctcacgaacaacttgggggtatgctagcacaacctagtggattactaagggtcttgctaccttttgatttttctagtatttttcttgattctttgcttgctgaattcgctagtctctatcctgggatcagtttcgagtttgatattaccgagcgaaaagtggatcttttctctgcatccattgatgtggccattcaggtaggggagctatctgattcgggactcattgccagaaagctggttcaacttcccagttatctttacgcatcccctcgttatctggcaaacatggaggagccaacacacccttctcagttggtgcaatatgattgtctttgcctacctcacgtgaaaacatggaaactgaaacattctaatgagaaggtagaggtaaaagtgaatgggcggtttatagtcaacactgcaaatatgttatgccgctttggcgtactggatttaggcgttcttatgctgccaaaattgatcgtggctgatgatgaagagaacggacgtttgaagcgtattttgcatgactgggaaggcgagcctgtttccatttatgctctcactgaaacacgtcttctaccggcaaaaactcaactttttattgagtttttacaaaaaaaattcaattgattagttctggttttatccaattggagcaggttaattcgctaatttgtcagtacacacagcacccttattactcgaggttttagcctttgctggattaatgagcattatctccccagggcaaatgcacatatgctaacttttgagattgtatcgcattaaggcgtcgtcggggaacatgctgttctttctaatgcctttgatccgaaatgcctttagccgcctgcattaccccatcgatgttatcgcgcaatgtgttcactggtacccacagtaccaacagcgttccttacggttcgcctaccattactggcagcactatggacttaccctgttccgctaaaatttaagagtggggaagacccttcctatccaccggcgatcacaatatccgtgcgccccgaaggcccaactacattgtcacggcagaaccacacagatcggttacccattcggcatgtgccgggaagcaacagatggcagaacatcaggttccttgatgggatattcctgctggaaccattattcaggcgacttccatgtcgcactagcctgatggatgctcaggctaaagactagtggtacagaagcatgggggcaaagacctgcccgcgatcaacgaggagagcatttacagcacgttcgaacagttgcaccgtgataagggtgaggtgtttgaacggggggtgatcaacgtgttcaagtcactctcctgggactacaaatcgaaccatccctgtaaatttggcaagaaagtcatcgtcaacggtctggtgagttataaccaatggggatttacactgaaccacagctaccggcgggaccaactggccgatttggaacgaatgctatttctgctcgatggtaaaccgatccctgacaactgtggcgatgttactacccgattgatggagcatattcgggacaaccctttgaaggaagtttacgaagatgagttcttcagcattcgttactttcagaagggaaccgcacatatcacttttaagcggagcgatctgacagaaaagatgaatgatattgtggcgaagcactatccggggatgctggcagcgagatgatgaagagggcagggaagcaattccttacctgacccattacctgacccgattcgtataaaacgaaaaaggagtcagacgatttctcatctaactccttgttttatttggtggcccctactggacttgaaccagtgaccaagcgattatgagtcgcctgctctaaccaactgagctaaggggccaggcggcgtgattatacggtaatcatgggatacaggtctacacccataaaaccatatgatgtttttatgcacagttctagcctgttgtaattgcaggcagattttgcgataaccgctgttaattccttttaacggactggtgatactcatggaactcttggcgccaaacctacaggtggtgttctgcggcatcaatcctggcctttcctctgcccatcagggctatccctttgccaacggcagtaaccgcttctggaaggtgatccatcaggcgggtttcaccgatcgccagttggccccggaacagtggctacaactgcaagataatggctgcgggatcaccgctctggtcgcgcgcccaacggtggccgccagcgaactttcacgtgatgagctgcgcggtggtggagaggtgctcaaagaaaaaatactgcgttaccaaccgcgtgctttggcgatcctggggaaacaggcgttcagcagtgcgtttggcgtgcgtaatgcagcctgggggcgacaggaaatgatgctgggtaaaaccgaggtgtgggtattgcctaatcccagcggattgaaccgtgccacgctggagcagcttaccgagagttaccgcgagctattcctcgcgctgaaataaggcataaaaaaaccccggcgagccggggttcttacgaggtcgttaaaccttagtcatccaggaagctacgcagcacttctgaacggcttgggtggcgcagtttacgcaacgctttggcttcgatctgacgaatacgctcacgggtaacgtcgaactgtttgcccacttcttccagcgtgtggtcagtgttcatatcgataccgaaacgcatacgcagcaccttcgcttcacgtgcggtcaggccagccaggacgtcgtgcgtggcagaacgcaggctttcagaagtagcagaatccagtggcagctcgagggtggtatcctcgatgaaatcgcccagatgtgaatcttcatcatcaccaatcggcgtttccatggagatcggctctttggcgatcttcagcaccttacggattttgtcttctggcatcagcatacgctcggccagctcttccggcgttggttcacggcccatctcttgcagcatctggcgcgaaatacggttgagcttgttgatagtctcaatcatatgcaccggaatacggatggtacgtgcctggtcggcgatagagcgggtgatagcctgacggatccaccaggtggcgtaagttgagaacttgtagccacgacggtattcaaacttgtctaccgctttcatcaagccgatgttgccttcctggatcagatccaggaactgcaggccacggttggtgtatttcttggcgatcgagataaccagacgcaagttggcttcaaccatctctttcttcgcgcggcgggctttcgcttcaccaattgacatacgacggttgatgtctttcacctgctcgatggtcaggccggtttcttcttcgatctgacgcagtttttgcaggctgcgctgaacatcttcattaacgtctttcagcttctctgaccagggtttacccattgccagtgccgctgcgaaccaggtatcactggtttcgttgccggcgaacagggtgacgaagtttttcttcggcattttgcactgctcaacgcacagcttcatgatgatacgttcttgcgtacgaacgcgatccatcatggtacgcatgctgttgaccaggaagtcgaactgttttggcaccaggcggaactgcttgaacacttcagacagcttcaggatctcttctgctgcgctggcgtggctgcggccgttctttttgataaccagacgagtggcttcgtactgatcgcgcagatcggtaaacttctggcgcgccagttcagggtcgatgctgttgtcgtcttcagcttcgtcttcttcgtcttcgtctttttcgtcgtcgtcctgctcttcggtggttaattcagaaccgatgtgcgttgcggtaggtgcgatgtcttcttccgcgttaggatcgacgaagccggtgatcagatcggacaggcgtgcttcgccagcctcgacacgatcgtactgctccagcagataggtgatggcttcagggtactcagcaaccgagcactgcacctggttgatgccgtcttcgatacgcttggcgatgtcgatttcgccttcacgtgtcagcaactcaacggtacccatttcacgcatgtacatgcgcactgggtcagtggtacgcccgatttcagattctacgctggacagcacctgagcggcagcttcttccgcatcttcgtctgtgctgttggtgttttcagccagcagcaggtcatcggcgtccggtgcttcttccatcacctggatgcccatgtcgttaatcatctggatgatgtcttcgatctgatcggagtcgacgatatcttccggcagatggtcattgacctcagcataggtcagatagccttgctccttaccacgttggacaagaagtttaagctgtgactgcgggttttgctccataagacggtatccacacttcagagtatttgggttggtgtcggtcggcgaaaccgccaacaatagcatttggggcgtttttgttgttgccgcggcccactgtggcggcatattgcagggctctgccctcgcatttatcggcacttaagccgtttggtattcagtctttcttcgccaatgccagttgtaatgaccagagttccttgcgttcgtctgcattcaggccatgcgttctgtcacgtgcgatcaaatcttcctgacgtttttccagcaccgagtcatagagattcgtcagagtatctaaaaagtgttgctcaacttgttcctcaacgatcatatggttccatgtcgccaaggtttcaagctgctggctcaatttgttatctcggtacaactccagcaactggccggtagtcaggcccggctgggctaaacaggtctgcaccagttcaacaaataacggtaaacccgcctgtttagtctgctcgagcccttccagggaagggataagtgtagccaaacgcggattttgcaccagtaatcctatcagtatacgcatggttgtgcgttttagctggggcgcctgataagtattcgcattttccgcctgtttgggcatcagcttgtcgagctggctatcgtccagcaggcccagtttgctgcctagctgttggcgcaggtagagacgcagtgtctcgcctggtacctgagtgatcagcggtagcgccaaagtactcagtttggcacggccatccgggctgctcaggtcgacctgtggcatcaacgtttcaaacaggaaagtggaaagcggctgcgccagctccattcgctgttcgaaggcgtctttgccttctttacggaccagggtgtccgggtcttcgccgtctggcaaaaacataaaccgtaactgacgcccgtcgttcagatagggcagtgcggtttccaacgcgcgccaggcggcttcacggccagccctgtcgccgtcgtaacagcagacaacgttatcggtggcgcggaacagcagctgaatatgttcagccgttgtcgaggttccgagtgaggcaacggcataatcaatgccatattgcgctaacgccaccacgtccatatagccttcgaccaccagcaaacgttgcgggttggcatggctctgctgtgcttcatacaggccgtacaactgacggcccttgtggaatacttcggtttccggcgagttcaggtacttgggcataccgtcgcccagtacgcgcccgccaaaagcgattacccgcccgcgtttgtcgcggatggggaacatcacccgttcgcggaagcgatcgtaagtgcgcccttgatcgttagtcaccaacattccggcatcgttcagtgctgcccggctgtcggtatcacgtccgaaacgttttaacgcattatcccaaccggcaggtgcaaagccgatggcaaaatggcggataacgtcgtcacttaatccgcgctgttgcaggtagttgcgcgcctgcgtcccgttggattgatgcagtgactgttgatagaacgtgctgagctgttccatcagttgatataggctttgacgctgatggcgttcgattggcgtcggtccggtgcctgcctcgtaaggcacttccagcccgtgcatggtggccagttcctcgatggtttcgacaaactcgagtctgtcgtaattcatcaggaagtcgacggcgttaccgtgcgctccacaaccaaaacagtgataaaactgtttgtcgccattaacggtgaatgaaggcgttttttcgtggtggaacggacagcacgcgtgatagttcttgccctgctttttaagctttacccgggcgtcgatcagatcgacgatgtcggtacgagccagcaagtcattgataaatacacgcggaattcgtccagccataagcccctgttacgattgcctataaacgagaacaagccgcgcattcctttcggaaagcacggccttcgtatgcaactactcggtctgcgtgttcttgaaaaagaaaaaaatcacgcggtggggttacccccgaaggattaatacagacgagtgcggcgtgcgttttcgcgagccagtttcttcgcgtggcgttttactgcagaagctttagcgcgtttacgttcggtagtcggtttttcatagaactcacgacgacgaacttcagctaaaacacctgctttttcgcaggaacgcttgaaacgacgcagtgcaacgtcaaatggctcgttttcacgtactttaattaccggcatgtgcctctcacctcaatagaattcggtttgctgctggccaagcgccagccttttcaaaatggtgcggaattttacttcaatggatgctgctttgtaaagcaccatagcaaattgaaacacgccgcgttccggcaaactcgcgcaattatgcatcggccgccgattatagactaatcagaaaaaattgctcgtttttaatcacccggcgggcaaccttgtgaatcatcgacatagcgcaccatcgcgcccagggtgctgcaggctggcggtaaatggcgttgattgtgataaactggcggccgcacgtgaatgatgggaaatgtaatgcgcgtattgggtatagaaacgtcctgcgatgaaaccggtattgcagtgtatgacgatcaagccggtttgttagccaaccaactctacagccaggtgaaactgcatgccgattacggcggcgtggtgccggagctggcttctcgcgatcacgtgcgcaagaccgtgccgctgatccaggctgcactgaaaaaggcgaacctgaagcctggcgatatcgatggcgtggcgtacaccgccgggccgggtctggtgggggctttgttggtcggggcaaccattggccgcgcgttggcgtttgcctggggcgtgcctgcggtgccggtgcatcatatggaaggccacttgctggcaccgatgctggaagataaccctccggaatttccgtttgtggcgctgctggtgtctggtggccatacccaactgatcagcgtgaccgggatcggtgaatataccttgctgggggagtcggtcgacgacgccgctggcgaagcgttcgataaaaccgccaagctgttagggctggattatcccggcgggccgatgctgtcgaaaatggcgcagcagggcacggaagggcgttttaccttcccacgaccaatgacggaccgcccagggctggatttcagtttctccggcctgaagacctttgcggccaatactatccgctctaacggcaacgacgatcaaacccgtgccgacattgcccgtgcctttgaagatgcggtggtggatacgctggcgatcaaatgcaaacgcgcgctggagcagaccgggtttaaacgcctggtgatggccggtggtgtcagtgccaaccgcacattgcgcagcaagctggcggaattgatgaaaaaacgcggtggtgaagtgttctatgcccgcccggaattctgcaccgacaatggggccatgatcgcctatgccgggatggttcgaatgaaaaatgggggtaacccggagttgggcgttaccgtacgcccacgctggccgctggcagagctgcctgcggtgtaaaagccaagggccggaatcccggccctgcataccgctggtttatgccttttcgctataccgacagtagccaaagagcgggggcaccggttctctattgacattccgagtcgaagacctgaatggacaccatagtaccgtctcttgcctcaggcatgagcatatacccgatgatgcattgcatgttgttgttctcaccccatttgaccgtaagtagccctttgtcttccgcgacacgggcatagacttgcccaccttgtcccacggaccccacgctgttgcctttgctatcaaaaacgtcggccccaaagggaaccggcccctcttgataggtggcattaatcaggatcggtgtaccccgtttggtggcgtattgtagtttcaccactgcaccggaatacggtgccaccttctggctggtattgttcagctcgacatcggacgcagtgcctttcgggtcaatgctgatgtcgttcatctggtacgggttcaggtaaggaaccaatgcataacctcgagagttgatgttcactcccggataggatgacacgctggccccttcagcccctttggcttcgaccaaagcaaaagtatccgaggtgtatggcgtgaaggtcagcccccctgcatggccgatcagcgtaccagtcatgccagccgatccgctctggtagcctcgtcccgtactgtaggttccactcaatgctgagactgggctacggtagttgccgctcacggagccactggtgcccatcccctggttggcgttcatggcggttagcccatagctgaactggttttctgctccggcgctacctgaaacggtggcctgttggccatcgcggccactgctatcgtgagacaggtccatacgcaactgaggtgtgtgggtttggtcatcccgtcccagaggcaggctgaaactcaacaggaagttggtctgcattgtgcccagactggaatggctacggttggcactgatgccataggagagacttttgtatcggttattgtatcccacctggtactgcatatcgctgccatcctggttccagtaattttgcaccgacccgctgacatacaactgcccccagttatccggcagtccctgcccggcagtcagggtcaggcgatctttaatgcggtatatcgtatccggatcgtacccttgctctacggcatttcgtgtttgcatggccgtcaaaaagtccatgtagccttgcgaagaggagtgatgcagcacgacggaaaggttgctgttggtctcactaatcagcttgctgtaagtgagttggtatctttgcccactcagggagccaccagagcgatgtaacccatccatattagtactgtcattcagctgtgtctgagcctgggtaacgtcaagggccagagctccaatcggcaggccaaaagcggccccgagctgtaaggcgtaataatcttggctggcctgaatgccgccataaccggtgatggcgttgttgatcccatattgatagatggtctggagcagtgcaggcttctcacgcaggttttccccacgcaactcaccaacggtgatcgcataccgtgacgatcccggtctgagcaactgggctaccgaggcatagggtacgctgaaggtttgttcggtaccatcagactcacgcacggtgacgacaagatcgccaccatagccggttgggtacaggtcattgatcaggaattccccaggcgtgacggtcgtttcatacaatacctggccattctgggttaccgtcactcgcgcgtttgtccgggcaatccctcgaatttccggtgcataaccgcgctgagactccggtaacatccgttcgtcggtggccagttgcacaccggtaaagggcaatgtatcaaacaactggccggtggtattcgactcacccaaaagcatgcggccctttaattgtgggatatcacgctgcaggtaagaattgatactggtgtattggcttggcccgttgctcatctgattataggagccgttgtggcgcagataccaggcccccagattcaacccggcgtttacgccggcaaacaacgagttgaagctttcgccatgcgactcgctggtataaccattgacgttatagccaagcaggaaggcggggatcccactgtcccagaggtctggactaacggtaccccgggcgacattcagcatgtaaatctgggggatgatgatatccagacgttgttcattgctgtcgaaattgacctgcgcttctggtagtttttgttgtagatccaggcacatgtcactgtcggcctgtcgactaaaaaagtctggcggcagcttctcgtagttgaaggcgaaatttttaatgatgtcgctggtcagacaggggtagaccgacttgtcggcccgtggtttgaattcaatatcggtgttactgattagttgatcattgacgtacagtgcggttttgtaaatgcccggcagagcagaggcaccctcggcaaaacggctgagatctaccgatgcctcatcatcaacattcaggaacgacgaatcgaattcgagatttgctgggggtgtttgtggcgtaggagcgtcttcagcctgagctctacctaccagaaaaattgtgagtgtcgctatccccataagggcgatgcgatcccagatgatatgccgcaaaaattttgacaccttgccccctcaagagcttgataccgaagtcaccaagcttgcagcagcaccggcgaagggcccacgttgctgattttgacgctgacttctctagcatctgatgggtaaatgacacgagtgccgcttattacgacactagccaatgagtgagcactgaataaggtagcggctgtaagagtaaaaatttggcagatattttgagaaaaaagtttcataaaaaactccaaacccaatatgggattgggggggatgcccctcccggaaggtattactgatattgaatagaatagactacattgctgaccacggtatccggggttgcaccttctgcatagtagcgcactgcgtatggcagattggcgctgccgcttgaaatgtcaacgtaagcggtattggttacctggttctggttacctgcctggatcaccgagagggattgtgccaaaccctagactgactcttgatcataaaccgtaaatttccgttgcaaacgagatggcaagatttggttaggggcgtcagtgcgcaggggaagcgagatccgtcatcgcgggcgtcagccaaaggcgcggcttgtgaccctgtgtttttccatgcgagaccttcaaatgtggagaaacgctcggtcacaatatgtttagaggcttgggggttttagaaggctgaagtttccagcctttcttgatcactcttccggtttttcttcctgttccacagcaccgtctttcttcttgcggaacttaccccagatcttcccttcctggccgcgccacaggcgctggatattgtcgtgatggcgcatcaggatcaggcaggaaagcatcgccaccgggaaggtaaactgcggtttgaaccaccagacgtagaatggcgcaatcagcgcgctgacgatcgccccgagcgaagaatagccgctcagcagcacggtcagcagccaggtgccggtcatcaggccggtgagatcccagccgatcggtgcaatggcgccgaacgccgtcgccacgcctttgcccccacggaagtggaagaacaccgggtagatatgcccaagacaggcggcgatcgccgtcaggcccagatacagcggtggaacgttgaatgcataggccaaccagactggcagcatcccttttagaatatcaaacaccagcaccgtagccgccgccaggcggccaccgatacgcaggacgttggtcgctcctgggtttcccgatccatgttcacgcggatccggtagcctggcgatccggcaaaccaggatcgcgctggaaattgagccacacagatacgcgaagataatcatgccaagcgcggtagcactcataacgcggttccgtctaataatggtcgttttactcgcaacatctatggataatacgcatattccgtcggaagtggtatccggcaaggccaaaaactgagaatgacgtgatggatatcgtatttattgaagagcttaccgtgatcaccaccattggcgtttatgattgggaacaaaccattcagcaaaagctggtgttcgatatcgaaatggcgtgggacaatcgccaggcggccgccagcgatgatgtgaatgattgcctgagctatgccgatatcagcgatgcggtcatccagcatgtgcagcccaatcgttttgcgttggtggagcgtgtcgcagaggaggtatccgaaattttgctacggcgctttaaatctccctgggtccgtattaaggtcagtaagccaggtgcggtagcgcatgccagccgggtaggggtgatcatcgagcgcggccagcgtccagcctgacaagttgtcaccaatatgcaactaaagaccgatatgctggtctgtaactagaattgtttaagcggcaaggtattgaacattgccgcttttttgtgcttgtaccttaaatttgaaatggggtagtggtctgatggcggacatgcattcattgtttgtggcattcgtgcttggggtagtcgaagggttgacagagttcctgccggtttcctcgactgggcacatgattatcgttggcgaattgctgggttttaccggtgataaggcaaaaaccttcgaagtcattatccagttgggttcgatcctggcggtggtggtggtgttctggcggcgtctgtttggcctgatcggcattcactttggtggcaaaccggtacctcatgaagggcagacggcagggcaactgaagttaggccatatcttgctggcgatgatcccggcagtggcgctagggctgctgctccacgacatgatcaaatcgctatttgaaccgaaaaacgtgatgtatgcgttagtggtcgggggcctgttgctgctggccgccgaatggctgaaaccgaaaaaaccaagcgcggtcgggctggatgatattacctaccggcaggcctttttgatcggttgcttccagtgtctggcgctgtggcctggcttttcccgttccggctccaccatttcgggcggcatgctggttggcgtaagccgttttgcggcctcggagttctcctttattctggcggtgccgatgatgatcggtgccagcggcctggatctgtacaagagcctgcacttcctgacgctcaatgacctgccgatgtttgccgtcggtttcgccactgcgtttgtggtagcgctaatcgcgatcaagaccttcctgcagcttatcaagcgtatctcgtttgtgcctttcgccatctaccgctttatcgtcgcggcggcggtttacatggtgtttattcattaattctggcaccagctcgaacgttttctcctctccaatagtgggctcttggcccactattttcatattacttgtattggcgcattcgattggtcgctaccagtggcttcaaattccatcaatgagaaaatctattgccgcttttatctgcgggcggtattgcgccgcattgcagaactcagcacccaaagcacgaacaggaatacttgcaagttcatgagccattacggcgtattctttgccgtccgtcagcatgattaccggattcatccggtctgggcgggtgctgcccggatatttttcaacaggcaacagcgggatcacaatgcgacggtttaactggccgataatatcgctcgttacatcaagtagcaggggataaacgacgctttttccgggattgtagtagacggtgaattgcatcgttaaaaagtcctgtactcatcgctaaagcagccgtgttcatcatggaaacgatttaacgcctcaagagcccctctgttttcttcctgccattttttcgctgcgtgatggcgtagttcggcatctagggcggcagtcaaagtggcactaaggttaattcctgcatcacgtgcccggttaagcaggcctcgttctacagtcattgtgacgctttgtgtattgcgtacttttactgtcatggtgtgctctcctgtgatgggttacgtgttatctacacgacatcatgcacgcattatagcaggctatagcgcgagggatccccaaataatggtgctgcttaatcttgctcatttagcacccccttctccccccttttggtccgaccaatgccggaaaaatgtgaacctctggcacataaacggcaaaaaaccaaacagacacattgcatgtttttaacagaaggttaaccatcggttatcaattatatgacttcgccctgttggtacgacccattaagcggaggagtaagtgaataatcgcgggagttatctacatggaagtctggcaacaagtttatgatcccattggcaatatctggctatcaagtgcgatcgcggcactgcctatcgcgttttttttcttggcgctgattaaactgaagctcaagggacatattgcagcaacgttaaccgttgggatagctttgctggtggcgttattcctctaccggatgccggttgatcgagcaatcgcggcggtggtctatggttttttctatgggctgtggccgatagcctggatcattattgccgcggtatttgtctaccagatttcggtgaagaccgggcagtttgacatcattcgctcttccattctctctatcacccctgaccaacgtttacagatgctgatcgtcggcttctgttttggtgcctttctggaaggggccgccgggtttggcgcaccggtagccattaccgccgccttgttggttggcctggggttcaatccgttgtatgccgccggactttgtctgatcgtcaacaccgctccagtggctttcggcgctatgggcatcccgattatcgtcgcgggtcaggtgaccgggttggacagctttgaaatcggccagatggtcgggcggcaattgccgttcctgacgattatcgtgctgttctggatcatggcgattatggacggttggcgcggcattaaagaaacctggcctgcggtggttgtggcggggggaagctttgccttggcgcagtatctcagctccaactttcttgggccagagttgccagacatcatctcctcgctggtttcactggtatgcctgacgctgtttctccgtgtctggcagccaaaacgcctgttccgctttgataatgccgaaggtgccgtcgtcgaccaaacgctggtgcagcaacactatgctttagggcagattattcgcgcctggatgccgtttattttcctgactgctacggtcaccttgtggagcatcccgccgtttaaagcgttgttcgctcaaggtggtgcgctgtacgattgggtactctctattccggtgccttttctggataagctggtcgccaaaatgccgccggtggtggcaaacatcacgccttatgccgccgttttcaaacttgactggttctctgccaccggcaccgccattatggttgctgcgatcgcctcggtgatttacctgcgcatgaagcccaaagatgcgctcaccacacttgctgaaacgctaaaggcgttgatgctacccatctattccattggcatggtgttagcctttgcctttatttccaactattccggcctgtcggcaactttggcgctggcattggcgcataccggcagcgcgttcacctttttctcaccgttccttggctggttgggcgtattcctgaccggctcagacacttcgtccaacgcgttgttcgccgctctacaggccaccacagcccagcaaattggcgtttcggatgtgctgttggttgcggctaacaccaccggcggagtcacaggcaaaatgatctcaccacagtctatcgcgattgcctgtgccgccgtggggttggtggggaaagaatctgacctgttccgctttacggtaaaacacagcctgattttcacctgtatggtgggggttattacaacgcttcaggcttactggctaacatggatgatcccatgaccgtaaatcttcaacccacttatccactacgctcggccgatcgtttggttgagcgtatcaaggtgatgatccgcgagcgccaactggaaatggggatgcgcttgcccgccgagcgccagttggctaacgagttgggcgtctcgcgttcctctttacgtgaggcgattcaaaagctgattggtgaaaaaacgctcactagccgacgtggcggtggaacctatgtctgcgacgagctttccccctggtcggagcaatgcatcgtggagccgctgagacccttggttgccgacgatcctgactatcgttacgacattctggaagctcggcacgccattgaggccagcaccgcctggcacgcggcaatgcgcgccaccgccgcagacaaagagaagctacaggcgtgctttgacgccatgttggcgcttcaggagagcgatcatcctgaacttgccgctcaggcggatgtgcgcttccatttggcaattgccgaggcttcacacaacgtggtgttactgcaaaccatgcgcggttttttcgatttgatgcgctcctccgtcatgcatagccgccagcgtatgtacacccagccgacgatcttcacccggctgactgaacagcacgaggaactgctgctggcgatcctggcaggcgatcctgaacgggcgggtaaagcggccaaatctcatctgggattcgtgcattccaccattaaaaatctgcatgaggacgaggccaggcaggcgcggattacccgccttcctgatgacaattcaccgtaacaagggagatcgcttgatgattatctcagcagccacggattatcgcgctgcggcacaacgtaaactgccgccgtttctgtttcattacatcgacggcggcgcttatgccgaacacactttgcggcgtaacgtggaagatctggctcaggttgcattgaggcagcgtgttcttaagaacatgtcggcactcagcctggaaaccaaactgtttaacgaaactttggcgatgcccgtcgtccttggcccggtagggttgtgtggcatgtatgcccgccgtggcgaggtgcaggctgcaagggccgcagagcaacaaggcattccgtttacgctttccaccgtatcggtgtgcccaatcgaagaggtggcgccggccatcaagcggcccatgtggttccagctgtatgtgttgaaagatcgtggattcatgcgtaatgccttggagcgggcgaaagccgcgggctgtaccaccttggtattcaccgtggatatgccgacaccaggcgctcgttaccgcgatgcgcattcggcaatgagtggcccctatgccgcccaacggcggtattggcaagccgtgacccatcctgcctgggcgtgggatgttggcctgaatgggcgtccgcacgatctgggcaatatttccgcttacctcggaaagcccaccggattagcagattatatcgggtggctgggggccaactttgacccttcgatttcatggagtgatttggaatggatccgtgatttctggcaggggccgatggtgataaagggcattctcgacgccgacgatgcgcgtgatgccgtacgctttggtgccgacggcattgtggtttctaaccacggtggtcgccaactggatggggtgctctcttctgctcgtgcgctgccgatgattgccgatgcggtgaagggcgatatcaccatcctggcagacagtgggatacgcagcggattagacgtggtgcgcatgattgcgctcggggcggatagcgtattgctggggcgagcctatgtttatgccttggcaaccgcaggccaggcgggggtggaaaacctgctcgctttgatcaaaaaagagatgtgcgtagcgatgacgctcacgggggcgaaaagtattgccgaaatcagccgtgattcgttggtgctggaggggtaggtaggggcgcatactgcgcccgttttacttaaggatgaggttcttgctgcttcttccagtccgccaatgcctgctggcggcggcgtttgacctcgtcgcggatcgccaacccttgcaggccactttccaccacctctttgacagaaaccgcgttggcgacctgataggcctggcgcaggtaatcgccctgcggataagggttgttttcaaaaccggtgcgcccgcgggcatcggcttcgctggtgaggatcatctgctctagccgctgcggtttacgccacacgtcgatggcatcaaacagttttaacagcgtttctggccgcagtttattaaccgtgtggatcaggtcgtgatactccgccaccagcttcgccagttcacgtactggattaggcactcgcagccgttggcaaagcttctcaaccagcctgacgcccgcagggccatggccatagtgatgtggccagagttcttgtggcgtgatgcctttaccaagatcgtggcacagcgctgagaaacggatatccacctctggactgagctgggtggcaatcgccagcgtcatcagcgtgtgtatgccggtatcaatttccggatgccatttctctggggcaggaacgccaaacagggcgtcgatttccgggaacagcactttcaacgctccgcagtcgcgaagcacctggaaatacacctgcgggctctggctctgtaacgccttctcggtctctttccacacgcgttccgccgtcagggaggccagttcaccgctttcggccatctgctgcatcagcgcgctggtttcaggggcgacggtaaagcccagggaagcaaagcgggcggcaaaacgcgctacgcgtaacactcgcagcggatcttcgccaaacgcgtcggagacatggcgcaacaggcgggcgtcgagatcggccttgccgttataggggtcaaccaaaactccatcatcaccccgcgccatggcgttgatggtgaggtcgcgccgcagcagatcctcttccagcgtcacgtccggggcggcgtagcaggtaaatccggtgtaaccctggccggatttacgttcggtgcgggccagcgcatactcctcatgagtttgcgggttgaggaataccggaaagtctttacccacctgctgagagccaagagccaacagatcggcaggggttgcgccgaccaccacccagtcgtgatccactaccggtaagttgagcagggtgtcacggacggcaccgccgaccaggtaaattttcacggtttaactcctatcaatagctcttttgatcagattacatcaattgggcagtggatgcgtcaggcaataaaaaagcgcccgtaggcgcttaaactggcggaacggtaatcagttcatccagcgattattcttgcggcgtgggatcagatgcggcaacaccagaccgagcagcaaaccaacgccggcaacgccgccgccgtacataaaccattgcagaataatggtgcgctgtttgtcgtcaagttgcagattcactgcattcaccttcttctgtgccacaaccagctgatttttcagatcctggttttcctgctgcaggccgctgatggtgctgtcgctggcggccaccttctgctgcatctcggcggtgcgctggttccagctattatcaatattggccagcttgtcggtcagggttttcacctgctgttccagctctggcacctgggtgcgcaggcttggtgtctggctaagctgatccatcgggatccagacgctgcgtcctttggaatcgcggatctggccgtagctggtgctatcattgacgctcaacagcgtgacttcttcaccggcattcaaggtgccgacgatacggtattggttacctgggccgctatggacataagtatttaattcatcggagatatagcgtttatcttcggcatgtgcgccccaagtgatgctaaaacttagcacggcaaggcaaatcaggcgtaatttctgcattatgtcatcgtttctgcgtggatttatggaacgatagtagagcgttcagtctgacggcgcaacgccaaaaccggaatgggaactatcttactatgctaaatcccatcagttgcgcagctttctataacgtaacaggttttttctgcagttggcagagtcaagtcagggggaatcgcggtaagatactctcactgtgcgtcgtcgggctgagtgcggccggcagactccgccgccgtgaagactcacgcgaatgcctaacctattggtgtaaaagaactatgagcgttgaaatagaactgaagtttattgtttcccccgcagcgattgccagcctgccggagcggattgccgcctggccgaatcagcattctgcgccacagaagctgaccaatatctactatgaaaccgccgacaacttcctgcgcaaccatgatatgggcctgcgtatccgcggttttgacgatagctatgaaatgaccatcaaaaccgccggttcggtggtgggtgggctgcaccagcggccggaatataacgtcgccatcgccaaacctgcgctggcgctgaaaaaattcccggcggatatctggccggagggctgcaagctggcgccgttgcaaaaggcgttacagccgctgttccgcaccgactttgtgcgtgaaaagtgggtggtcacttacggcgcaagcgagattgagattggcctcgatcagggcgaagtccgtgcgggtgaactggccgaaccgttatgcgagctggagctggagctgaaaagcggtgagactgctgatttgctggcattggcagccgcattggcggaacagggtggtttacgccagggcagcctcagcaaagcggctcggggctatcatctggcgcagggcaatgtcgaacgtgagttacgcccattaagcgtgttgaagccagctcctaaatccacggtagaacagggcatggtggccgctttcgagctggcgctgagccattggcagtatcacgaagaactgtggctgcgtggcgacaagcaggcacgccgcgcggtaatggaagcgatcggtctgatccgtcaggcactggtgatctttggcggattggttccgcgcaaggcaagcaccgatctgcgcgctcggttgacggctttggagcctttgctggtggataaaaccccccagccgcaggagctgtgctacggcacggagtatctgcaatgtaagttggcactcacatcgtggttgatcaccggtgcatggcggccgtttatcgatgccaaatcgcaggctaagctggatggttcattcaagcgttttagcgacatcatgctgggccgtagcgccgcagagctgaaagaagcctttacacgcaccctgaatgaagatgaatatcaagagcaactgccccgtctgacgcgccaggtgttggcatttattctgctttctggtgcctatccggatagcgaaaccgggccgtatattgacagctggcgcgagctgcaatcagccattgccgaacgtcggcagggttggtatgaagccagccgcaaacaggcattatcccatgcgccattctggttaaacggcgcggttcgttaactccagcgggcctgccgggctgcaggccacagaacgggtcattcactatgttgccactctctgctgcgttacagcttcaggcacagaacatcgtgcagcgatttcaggaaactcagggcgcggagttgatgctcagcgccgcagaacaaagcgttctggcgtcgagtgattttgtcagtgacatgttgctcggccatcctgaatggttggtaacgttacgccagcagccgccggtggccgatgagtggcagcattatgccgcctggttgcaggatgagcttgaagaggtgcaggacgaagcgcagctgatgcgtgtgctccgtctgttccgccgtgagagcctggtgcgcattgcctgggcgcaggctcagcagctatgtaccacgcaagaaacgctacaacagctgagtgccctggcagaaacgctaatcgttagcgcccgtgactggctctatcaaacctgttgccgcgagtggggcacgccttgcaatgccgatggcgtgccgcagcctttgctgatcctggggatgggcaaactcggtggtggcgaactgaatttctcgtctgatatcgatctgatctttgcctatccggaaaacggccatacgcagggtgggcggcgtgagctggataacgcccaattctttacccgccttggacaacggcttatcaaagcgttggatcagcaaaccattgacggctttgtctaccgcgtcgatatgcgtctgcggccgtttggcgatagcggcccgctggtgatgagctttgccgcgttggaagattattaccaggagcaggggcgcgactgggaacgctacgcgatggtcaaggcgcgcctgatgggggggcatgaagatgcctacagccaggaactgcgcaagacattgcggccattcgtgttccgtcgctatatcgatttcagcgtgatccagtcgctgcgtaatatgaagggcatgattgcccgcgaagtgcggcggcgggggctgaaggacaacatcaagctgggtgccggtggcatccgcgaaatcgaatttatcacccaggtgttccaactgatccgtggcgggcgtgaacccagtttgcaggggcgctcactgctgccgacgttgcaggcggttggtgaacttgggttgttgaccgcacagcaggtcgctgagctgagtaacggctacctgttcctgcggcggctggagaatctgttgcaggcgattgccgaccagcaaacgcaaaccctgccgcaggacgagttggatcaggcgcgtctggcctggggaatggatcagccagactggccgtcgttgatggcggtgctggaagagcatatgcgccaggtccgtgcggtatttgatgacctgatcggcgacgacagcccagacgtaggcgaagatcccaactaccagcattatcacagcctttggcaggatgcgctggacgagaacgagctagcaccactgacaccccatctggacgaagaggcgcggcggcagatgttgcgttccatcgccgatttccgccacgacgtggacaaacgcactattggcccgcgtggccgcgacgtgctggatcaactgatgccacgcttgctggctgaagtgtgttcgcgcgtggatgcggccacggctctgacgcgcctgacccagttgttactgagcattgtgacccgaactacctaccttgagctgctggtggaataccatgccgccctcagccacctgatccgcctttgtgccgcatcaccgatggtggccagccaactggcgcgttatccgctgttgcttgatgagctgttggatccggccacgctgtaccaaccggtggccccggatgcctatcgtagcgaactgcgccaataccgcctgcgggtgccggaagacgatgaagaacagcagttggaagcgttgcggcagttcaagcaggcacagcacttgcgcattgccgctgcagatatcgccgaggcgttgccggtgatgaaagtgagcgatcacttaacctatttggccgaggctatcattgatgcggtggtgcagcaggcgtggaaagacatggttgcgcgctacggccaaccaacccatctgcatgaacgggaggggttagggttcgcggtgatcggctacggtaagctagggggctgggaactgggctatagctcggatctagacctggtgttcctgctggattgtccaccagacgtcatgacggatggcgatcgttgcatcgatggccgtcagttctatctgcgtctggcacagcgggtgatgcatctgttcagcacccgcacctcttcaggcattctctatgaggtggatgcccgtctgcgtccttccggtgctgccgggatgctggtcagtaccgtcgaagcctttgccgactatcagcgtaacgaagcctggacctgggagcatcaggctctggtgcgggcgcgcatcgtgtatggcgatccggcgctgcaccagcagttcgatgcgatccgccgcgaaattttgtgcaaaccgcgtgaagtgaacaagttgcagcaggaggtgcgtgaaatgcgcgagaaaatgcgcaaccatctgggcagcaaacagcgcgatctgtttgatatcaaagcggacgaaggcgggatcaccgatatcgaatttattgcccaatacctggtcttaggttatgccgcgggcgaaccgcgcctgacgcgttggtcggataacgtgcgtatctttgagctgatggccaattacgacatcatgccggaagacgaggcccaggcgttgacccaggcctatgtcaccatgcgtgatgagatccaccatttggcgttgcaggagcactccagcaaagtcagcagtgagctgtttaccgccgagcgtgagcaggtgcgtgtcagttggcgcaaatggctgggctgagggggcatatgggttccctcaccctaaccctctcccaaagggagaggggaccgatcgagtgtgtttgaaattatagtgactcatcttggttgagggggcgattgagattatcgctttactgccaaacgagcaggggctatcaactccctcctccaaaaggagaggtgatcgagtgtgtttgaaattatagtgactcaccttggctgaggaggcgatcgagtttgtggagattatcgctttactgccaaacgagcaggggctaccagctccccctccctgtgggagagggttggggtgagggggcagtttttacgggtattgcaggctattatgctaatatctgccgaatttatttttatgacttgtttggagttatcggatgaaagttacactacctgattttcgccgcgccggtgtgttggtggttggtgacgtcatgttggatcgctattggtatgggccgaccagccgtatttcaccggaagcgccggtgccggtggtcaaggttgaaaccatcgaagagcgtcccggtggtgcggctaacgtcgcgatgaacatcgcctcgttgggcgccaattcacgcctggtgggcctgacggggattgatgacgcggcgcgtgcgctgagcgccaagctcaacgaagttaacgtgcgttgtgactttgtctcggtgccgacgcacccgaccatcaccaagctgcgcgtactttcccgtaaccaacagctgatccgcctggacttcgaggaaggtttttccaacgtcgatccgcagccgatcatggagcgtatccagcaggcattgccgcagattggcgcactggtgctgtcggattacgccaagggcgcgttgagcaaggtgcagggcatgatcgcactggcacgtgctgcgaaggttccggtactgatcgacccgaaaggcaccgattttgaacgttaccgtggcgccactctgctgaccccaaacctgtccgagtttgaagccgtggtcggtcattgtcagagcgaagaagagttggtgacgcgtggcatgaaactggtggcggactttgaactgtctgcattgctgatcacccgttccgagcaggggatgacgctgctgcagccgggccgtgagccgttgcatctgccaactcaggcgcaggaagtgttcgacgtgaccggtgccggtgatacggtgatcggtgtactggctgccgccctggcagcgggtaatacgctggaagagtcctgctttctggctaacgccgccgccggtgtggtggtgggtaagttgggtacctcgaccgtctcgccagtcgaactggaaaacgccattcgtggccgcgccgaaaccggctttggcgtaatgaccgaggccgagttgaaaaaagcggtagcgcaggcgcgccaacgcggcgagaaagtggtgatgaccaacggcatcttcgacattctgcacgctggccatgtctcatacctggcaaatgcgcgcaaattgggcgatcgcctgatcgtggcggtgaacagcgatgcgtcaaccaagcgcctgaagggggaaacccgcccggttaacctgctggaaaaccgtatggtggtgttgggcgcgctgggagccgtggattgggtcgtgccgtttgaagaagatacgccgcaacgcctgatcgccgaagtgctgccagatttactggtgaagggcggtgactaccaaccgcatgagattgctggcagtgctgaagtctgggccaacggtggcgatgtgcgggtactgaactttgaagatgggttatccaccaccaacatcatcaaggctatcaaggatggtcgtggttaacgttatctatatatctataccctatggatttcaagctgtgggtaagcgcaggtaacaacgctgcagcttgaaagacgacgggtaaacagggtggtttgcagtgagtggacttaagcaggagctgagtttagcgcagggcgttgggctattgtccacttcactgctgggtaccggggtctttgccgttccggcattggcggcgcaggtggcgggcggcgacagcctgtgggcctggccaatactgattgtgctggtattcccgatcgctatcgcttttgcggcattgggccgccatttccccagtgccggtggtgccgcgcattttgtcggcctggcctttgggccacgcatggcaaaggtaaccgcttggctgttcctctctgtgatccccgttggcttgcccgccgcattacaaatcgccgcagggttctggcaggctactttgggttgggatgccaacggcctgttgttggtgcaaattgtcacgctggtggtgatttggctgcttggcacacgcagtgccggttccagtgccaatattcagaccttgattgcccttctggtgatagctctggtgggggctatctggtggcaaggcggcattactccatcccaaatcccatggcctgcagtcagcgatatttctcctcctaatatgttccacgcgttggcggtgatgttctggtgctttgtcgggctggaggcttttgctcatctggcgaccgagtttcgccatccagagcgggactttccgcgcgcgttaatgcttgggctgttggtggcgggggcggtctattggggctgtaccgtagccgtgctgcacttccatgcttacggcgaacatcaggcggcggccgcttcgttgccggggatcgtggtgcaactgtttggcgaacatgcgctgtggattgcctgcatcatcggctatctggcctgttttgccagcgtgaatatctacacccagagctttgcccgcctggtctggtctcaggcccaggaaaagcctgctagcggtttagccaaactctccgcgggccaggtgccggtcaatgcactgagcgcggtggtcggttgctgcctgttgttcactttactgatctataccctgaagctgccgctggatacgctgctggtatacgccaatggcattttcgtgctgatttatctgctgtgtatgttggcgggttggcggatcttgcaggggcgttcgcggttgatggcgatcgttggctccgcgttgtgcttgttattgctggtgattatcggctggaaaagcctgtatgcgttggcgatgttggtgctgatctggttggtgctgccgcgtaaaacgcaggcggtggtctccaagcaataagggcgcactggtgcgccccttacaacaacttattcgtctgctggcttggctaccggcgcggtattcagcttgccttccagttcggtcagacgctgttccagcaatgccagcttttcacgggtgcgcagcaggacctgggtctgcacgtcaaattcttcgcggttaaccagatccaggcgggtcaactgcgcttgcagtacctgacggatttttttctcaacgtcttccccgaattcacgtacgcctttaggcatcgactcttggacctggcgtgcgatctgttcaatttttttcgggtcaatcatggcgtttccctttctgatatttggtggctgacgcttagtgtaatgcgagttgctcgccggataaactattaccgtatttgctgcgcgatccctcattacgcgaccggatggcttgaaacactaaagcgatggggttatagtcgagatgcttattctcagggcggggtgcaagtccccaccggcggtaaatcaccattcacggtgaaagcccgcgagcgctcaacctatctctcaggagtgggttagaggtcagcagatccggtgtaattccggggccgacggttatagtccggatgggagagagtaacgacacctgtcgggcgtatgccccgcttgcgttatttttttggctattggcatagccactcctcaagatcgccctggttctggtaatccataattttaatgaggttttttaccatgaatcagactctactttcagatttcggcacgccggaagaacgcgttgaacgcgctcttgatgcattgcgcaacgggcgcggtgtaatggtgcttgatgatgaaaaccgtgaaaacgaaggtgacatgatcttcgccgcagaaaccatgaccgttgaacagatggcgctggccattcgccacggtagcggcattgtttgcctgtgtatcactgaagatcgccgccagcagcttgagctgccgatgatggtcaccaacaactccagtcagttccagaccgcctttaccgtgacgattgaagcggcgcagggcgtgaccactggcgtatcggctagcgatcgcctaacgactatccgtgcagccattgcagacggtgccaagccaagcgatctgaaccgcccaggccatgtgttcccgctgcgtgctcagcctggtggcgtattgaaccgccgtggccacaccgaagcgaccatcgatctggtttcaatggccggtttcaaacccgctggcgtactgtgcgagttgactaacgatgacggcagcatggcgcatgcgccagaagtgatcacctttgccaagcagcatgacatggtggtgctgactatcgaagatctggtggcctatcgccagtcacgcgaaaagaaagccagctgagttgctgactgaagtgaaaaagccgctgatgaagcggctttttttgtgcttaaaattctttagccgataccgccgctttgcaacagcgtcaggctaacccccatcaccgccataccgcacagcacgccatagcttggattattgtgtggatcgatctctttggccaatggcattaattcatctaccgacagcgccaccataatcccggccaccgcagccataatcgacgccatcaccaccggtgaaaccatcgggccgagcaccaggaaggccattacgccacccagaatttctgccattccggagatcccagaccacagtagcgctttggttttagagccggttgccgcatacaccggcccggcgactgccaacccttctggaatattgtggatggcgaccgcgagcgcaatgcccatccccagttccagatcggcgctggcggtgacaaaggtggcaatcccttccgggaagttgtgcaggctgatgccgagcgtcagcagcatggcggtgcgcttcaggttatggggcttgatgggcttttgcaccaggtcttgcgggtgttggtgtggcagcatgcgatccagcgcaaagtagcctaacagcccgagcataaacatgccgtagccaagcatgggtgacatgccgacggtgtgcagcgcagcgggcagcatttccatcagcgagatcaacagcataatccctgcggcaaagccgagcgcaaacgccagcaggcggttggagggcttctggccaataatgccgagcagggcaccaacaaaggtagcgcctccggctaacaaggtcaggatcagcggtacagacatgcattctccttgtatgctaataatatttatcagtttctgatactaacagagccaagtcataaatcgagtggatttggttgatggtttcaatcgttccagccattcaaatttcttgaagatcaccatcagggttatccggctgcctcggtaaggcaaacagcgtaatgtagtcagcagaacacttgtcatgctaaccaaggatattttatgaccacctctcgtatgcctgcactctttcttggccacggaagcccgatgaacgtgctggaagaaaaccgctatacccaggcctggcgtgcgttgggtgagcaattgccacggccaaaggcgatcgttgctgtgtctgcccactggtacactcgtgggacggcagtgacggcgatggaacatccaaaaaccattcacgattttggcggcttcccgcaggcgctgtttgatacacagtatccggcaccgggttcaccagagctggcggcagagctgcaaagcctgttggccccggcgcaggtgattgccgataccagtgaatggggtttggatcacggcagttggggcgtgctgatcaagatgtacccgcaagccgatatcccggtggtgcaactgagcatcgatgggactcagccagcggaataccactttgagctgggccgtaagctggcggcgctgcgcgatcgggggataatgatcgtggccagcggcaacgtggtgcataacctgcgcatggtgaaatggcagggggacaccagcccgtatccttgggcggagtcattcaaccagtacgtacgtgataacctggattatcagggcgaacatcacccgctggtgaattatatgcagcatgaaggcgcagcgttgtcgaacccgacgccagagcattatctgccgttgctgtatgtattgggcggctgggatggtaaagagccgatctcggtaccgatcgatgggatcgaaatggccgcgctgagcatgctttcggtgcaggttggttgaataaaaaaggcgcgaaaatttcgcgcctttagttatttctggtttaactgttagccaagaataatatgcgggtagaagcgcgacagatcctgggtgatcaactcgcgatcttcacgcaggccaataccgcaaggctgatcgtggaccagccagctgccgatcagcgtataactgccttcaaactggggcaattgatggaactgctgcacaatcatgccttcttcgccgtatggcccatctacgcgcgccacttcctgaccgttctggacgatctggatgttggcaccctcgcgtgagaacagcggcttggtgacgtaatgatccatttgcggatgatcgtcctcggcaaagtaggctggcagcaggtttggatgatccgggaacatttcccacaacagtggcagcagagccttgttggagataatgctcttccaggccggttccagccagcgtacgccagcgtcttccagcttggtggagaacatctcgcgcagcataaattcccacggatagagcttgaacaggttactgataacctgattttgcagatcggtgaactggcctttctcgcccaggccaatctcttccataaacaggaattcggtcggcaggcctgcttccagcgcgcagtcttgcagatattgcaccgtaccgcgatcttcctcgctgtcttggcagcaggccagatgcagcaggctaaagccgtggttggcttgcagatcggcgaaacgttcgatcagtttttcttgcaggctgttgtactgatcagcggcgggatccagcttgcctgcgttgatctgatcttccagccatagccattggaaaaacgctgcctcatacagtgaggttggcgtatcggcgttattttccaacagcttgggtggattgatgccgtcataggccaggtcgaggcgtgaatacagcgaaggctgattagtgcgccaggagctgcgaacgaattcccaggtgtgcttggggatgcagaatttggtcatcagttgatcgctgttgaccaccttatccaccaccttcaggcacatttggtgcagttcggcggtggcatcttcaatctcttcgatctgcgccaatgtgaattggtaataggcatcttcacaccagtagggttcgccgtacatggtgtgaaaggcgaaaccaaattcggtggctttttcgcgccagtctgggcgctcgctaatcgcaacgcgtttcatgtcttaaccgcccatgctgcgtgagctgctggaggtggcgctgctgcgttgcatgctggtctgtttggccacggactcaccgaaaccaccacgggtaacggtattggtcaccgcgggtttaggggccattgcggttttaggtaccgtcatggagcggccgcctgcggttgccgggccatagcttttaccgctggcgtcaacaaacttgccgtttgccgggctggcggcgtttttagaggaaaacagcggctgttgagcgtagcccccgccacccatcatgcggcccatcatgtagcccgccatcagcggcatccacatgctgccactgctttgtgattctgcggccatgccagcctgtgctggagcctgagtacattgcgcttcaccgaattcggctacgcagtcttcacgagtggcatatttaggtgcggttttttccgcttctttcagcgcgttgttatacgcggtggtgcactgctcgctcatcgacgggttggaggttgaacaatcgtcagcatttttatacagggaaaccgtctcatccgcctgttcgcagccggccagcataaacactgcgctgatcgccaaagccacgggggcaacacggtagctgcgccaggatttgcggaaggtgtctttgttgatgtttttggtccgtttcatcgatatttatcccatcatgcgggctgtattcgcccttgcccagtagtggtcgataggataggggaaagatgctcaaaattaaagctgaaacacccgcaggatccactctttacgcacttatacgttacggtgtgcgccagttcgctttactgcgcataactgcagcaaaagcgttacataatggaacgttttgcccgaagctacgttccattatgtaacgtttttttccttactcgccaagcggccggcaggtcgtatagtcagcaacagaacaatacgtcgatatcaccctctgaaatctgaacgttacttggttaacgtctctacaaggagtcagttatgttgagaatcattcaatccccgagcaaatacatccagggagccaatgcgttggcctccgttggccaatatgccaaagcccttgccgatcattactttgtgatcgccgacgatttcgtcatgaaactggcgggcgatactgtgatgggcagcctgcatcagcacggggtgaagtatcacgctggtacgtttaatggcgaatgctgccgcaaggaaatcgaccgccttggccaggagctgaaaagccatggctgcaaaggggtgatcggcatcggtggcggcaaaacgttggataccgccaaggcgattgcctattaccagcatgtgccagtggttctgatgccaaccattgcttcgacggatgcgcctaccagcgcgttgtcggtgatctacagcgaaagcggcgagtttgaagaatacctgatctaccccgccaacccgaatatggtggtgatggacagcgccattatcgccaaagcgccggtacgcctgctggtggcgggcatgggcgacgcgctctccacctattttgaagctcaggcctgcttcgatgcccaggccaccagcatggcgggcggcaagtctacgctggcggcgctcaatctggcgcgtctatgctatgaaacgctgttggctgaaggagtcaaggccaagctggctgcggagtctggtgtggtcaccgaagcggtggagcgcatcattgaagccaacacctatctgagcggtattggttttgaaagcagcggtctggcggcggcgcatgccatccacaacggtttcaccgtgttggaagagtgccatcatctgtatcacggggaaaaagtggcgttcggcaccctgtctcagttggtgctgcaaaacagcccaatggcacagattgaaacggtgctgaatttctgccagcaggtcgggttaccgatcaccctggcacaaatgggcgtcaccggtgaactgacagaaaaaatcggcaaggtggcagaggccagctgtgccaaaggtgaaaccatccacaacatgccgtttagcgtgacgccggaaagcgtactggcggctatcctgacggcagacaaactgggccgcgcctggttgcaacgcgcataaatcatcgggcgcgctcaacgcgcccgctgttctctacagaggaattaaccgtgaaaaagctaatcaatcaggtcgattcggtacttaacgaacagttactcggcatggctgctgctcacccggagctgcaggtgcatcaggatcctgtgtttgtgacccgcacggcggggccgatcccaggcaaagtggcgatcctgtctggcggtggtagtggccatgagccgatgcactgcggcttcgtgggtgaggggatgctggacggtgcctgccctggggagattttcacctcaccgacaccggataaaatgtacgactgcggccaagctattgacggcggcgccggggtgttgctgatcatcaagaactacaccggtgacatcctcaactttgaaacggcgaccgaattgctgcatgacagcggcgtgccagtggcaacggtgctggtggatgacgacgtagcggtcaaagatagcctgttcaccgcaggccgacgtggcgttgccaatacggtgctgatggagaaactgctaggcgcggcagcggtacggggtgacgatctggaggcgctggtcacactggggcacaaaatcaacaaccaaggccactcgctagggattgctctgggcgcttgcaccgtgcctgcggcaggtaaaccgtcgtttactttggcggataacgagatggagttcggcgttggcatccacggcgaaccggggatcgaacggcggacgttcaccacccccgatcaaacgggggatgacatgttcgctaccctgannnnngtggatgacatgttcgctaccctgatcgataacggcgattaccagcgtacgatccgcgtttgggatcgccagcaaggggaatggcgtgaagagagccaaagcaaacgagccttgacgcagggcgatcgggtgattgcgctggttaataacctgggggctacgccgctttccgaactgtacggggtttaccaccgtttggcacagcgctgtgctgcggccgggatcgtcattgagcgcaatctggtggggtcatactgcaccgcattggatatgcagggggtttccatcaccttgctgcaagtggatgacgagctgttatcgctgtgggatgcgccggtgaacacgccagcgctgcgctggggttgaggagggattatgacattaagcaaacagcaggtcgttgagtggttgatgcgttgtggtgaggtctttacccgcgaacgcgatttcttgactcagttggatagcgatatcggcgatggcgaccacggcctgaatatgaaccgtggttttagcaaggtggtagaaaagctgccttcggtagcggacaaggacatcggctttattctcaaaaacaccggtatgacgctgctctccagcgttggtggtgccagtggtccgctgttcggcaccttcttcatccgtgcggctcaggcggccaacgccaagcagagcctggatttggcggagttgaggcaggtgatccaggaaggcgcggaaggcgtagcgatgcgtggtaaggcagagccgggtgataaaaccatgtgtgatgtctgggggccggtcgtcgcaagcctgggcgagtcgttacaacagcagctcagcgtgacccaggcgctacaacaggccgccgttcgggctgagcaggccgcacagtccaccatcgtcatgcaggcccgtaaagggcgcgccagctatttgggcgaacgcagcattggccatcaggacccaggcgcaacctccgtcatgttgatgataaaaacgctggcccaggtggtcgaggaggcaggatgatcaacatcgtcgtggtttcacacagtgcgcaattggcccagggtgttgagcaacttgcccgccagatgatgcgcggtgagggttgcaaactggtgttggcggcgggggtcgatgatgagttacacccgatcggcaccgatgcgatgaaagtgatggaagcgatcgaatccgtggctgacggagaggggatcgtggtgctgatggatctcggcagcgcattattgagtgcggaaaccgcgcttgagctgctcgacccagaggtggcggccaaggtggtactgtgtgcggcaccgctggtggaaggtacgctggccgcggtcgtagcggctaatgcgggcggtagcctgaagcaggtgctggcagaggcgcaaggagccttgcaggccaagcaggcacagctcggtgaggagatacccgccagcaagccactgaatttaccgctgagtcagggaaaaagcctgagttggacggtacagaatccacacggattgcacgctcgcccggcagcgcgtctggcagaggctctggctccatttgcagcggaactggtgctggaaaagcatggccaatgtgccaacccacgcagccttaatcagctggctttgttgcaggttcgccacggcgacactatccgcctgattgccgatggcgcacaggctgatgaagcgctggcggctttcaaggcgttggcagagcagcattttggcgaaaccgtatctgagcagcaactgccttcgctgcacggtatccccgtggaggaaagcgtcagcagtggtccgatattccaggtatcgagcttctggccacaaacggaagaacgccagctaggggccgatgacgtgctcaatgaacagcagcgcctgcgtatcgcattgcagcagacgttagacgatttgaacaggctggccgatcgcactggcaacctgatcggcaaaccgcaggcggcgatctttggggcgcacagcatgctgctagacgatcctgatctgcaacaggctgcctttacccgtatcgcccaacagcagtgcagcgcggaactggcgtggcggcaggagctggagcagattgccgccgattatcgggcgctggatgatgagtatttgcaggcgcgggaactggacgtgcgtgacatgctgcgccgtacgctgagccatctgtcacggcagcctatcccggcgatcgtgctcaatgagccagcgatcctggtgatggatgagctgatgccttccgacgtcgtgatgctcgatcggcgcatggttctcggtatttgcctgagcggcggcaacgccttgtcacacaccgcgatcctggccaaagcgatggggatcccgatggtggtcggcatgagcgaatgtatgagcaagacccgcagcggccagaaagcgatgctggacgcggcgcgcggtaccttacagctcagccattaaccccgcagcttgaactggctgatatcgatattcaactgtttgactttacgccacagagtggtgcggctgatgcccagcagctgcgccatttcgttaagctgcccgtggctgacgttggctacgcggataatagcctgcaactccatttccgccagcgtcatcagtggcatagccggttgagagtcactttccactagcggctgatggctgagcaaatgagcgggtaggtcggccagttgaatatggtggccgtggcaaatcatcgcggcgcgctctatcacccctttcagttccagatcgttacccggccacaggtacagaccaagctgggtcataacgtcgtcgtccacccggaaacgacattggaagtgatgctccagggcgcgcagatggtgctgaaccagcaaagggatgtcactgaggcgctggcgtaacggcggaatttggatctcaaaggcctgcagactataaaacagctggcggcggaagcggttctgctgcaccaacagcggcaggttggcggcgctggtagcgatcacccgtacgttcaccgggatcacgcggctggaattcatacgcatcaccactccggtttttagcacctgcaacagagcggactgcatggccagcggcaggtattcgacctgttcaagatgcagcgtgccgccgttggccagttcgaacttactgagttggcccgcttcttcttcattggcatcactgcccaacagctccttcaacccttgcgcctcgggcagcaactggcagtttaaggcgatataaggcccgacggcccgttcgctggcattgtggatggcctggctgaccagttctttccccaccccttcttcaccgcacagtaaaatcgggtgatggcccttcgccgcctgctggccatagcggatcaggcggcgcatttcctgggtgccggaaggcatctgttcgaaggtgtggctgacccggccgatctggctgctgacgtactgatgcagcctttccaagggatgcagcaaggcgataaagctacagtgctcaccgtccaggatcggtttgagggtgagtagcgcggcgataaactggccctggctttcaaaggtgacttccacatgctgtaacggctggcgttggctgatggcgcggttaagcaaggccggtagcgtcaataactgtgtcagcggcttgccctggctctgctgttcgtgcagcttcagcatagcggcggcgcgcgggttgatatattgcagataaccccggtgatcccaggccatgacaccgtcgtctacgctatccagtagcccgttgagctgattgagatggcggttggattcggccagcaggccgtcggcgttcagggcattgccgatctcccgggcgatcgccaggatcagggaaagatcgcccgcattacaatcggccaactggcagcccaaagccagcataccgcgctggcggccgctattgtcatgcaccggtgcggcgcagaatgaccagccatgcagcgcctggcgcacgtgttcatcgctatggatctgtactggatggccctcggatgcggccagagaaggggcattggtgccgatgtcgccttctgcccaataagcgccgggagcaaaacccagttcgagcagctgttcgccggtcgtcttgtcgccacattgccacagcgtacagccgctttcgtcgaggatcagcaacacgcagtggcgctgttccatatattcccaggcatcctccaacgccgcctggccgagcgtaatgaaatcatccttacgccggcagatcgagtcgaaggtggtgcccagggcgcgatgtggggctttccacacggcgggttgcatcaggtggctgcagcgtagccaggaggcataaatggcaggggaagggcgcagctgtggcggtaacgcgccttcggtgatcaaccgttgccagagtgaagcgttgtccatcagatcccgttcagcaggtaaacccaaatagggaactaatcataacattaacccatttacagaggctgtgaggcgatgggcagaagcaggatcattggataaaaaaacggagcgcggtaaaaaccgggctccgttattcggtagctcaaagccgccgcagattatctgctggccgttggccgggtggtgctggaaccgtcaacgtaggcatcttgcgccgttgttggtggggccaccacgtctggtgcggtggagattggcttgcctagtgctccgttcagcatcatcagatcgttttcgttcagcgtgccgagcgcggatttgatgttcaactggttgatcaggtaagaataacgcgcattggaaagctgctgcttggcgttatacagcgtggttgtcgcatccaacacgtcaacgatggtacgggtacccacttcataaccggcttcggtcgcatccagagaactctgggcagaaaccaccgcttgtttataagcgctgatgctgctgatggacgcagaaacgttgttgaaggaggaacgcacggtttgcaccacgctgcggtgggcgctttccaactgctcgctggcaccgacgaagttgtactgcgcctgttctacccgcgagttggttacgccgccgttgtacagcggcacgctaacgctgatgccgacctggttctggccattaatcgagtcgttgccactagtaccagtgttagctctggaaccactgtatttggaattggtgatcccggtagaagcatttaaatcaaccgttggcatatagccggtttgcgccgatttgatctgctcacgggccagatcctggctcaggcgggcagacagcaggctcaggttacggctttctgcttccttcaacaggctgttgacggcatccgggcgcttggtgctgaacttgttggtatccagcgaggccagttccgggtagaaggtgccggtaatttggcgtaacgattctaccgcgttatccaggttgttacgggcggttacttcgttggccaacacggtatcgtagttggcacgggcattctgcacgtcggtaatggcaaccaggcctacgttaaaacgctgggtggtctgatccaacgtacggtaaaccgcttgtttattcgcctgggtgtaggacagggcatcgatcgcctgtagtacgttgaagtaggcggtggccgtatccaggatcaatttctgggatgacgtctggaaagtgacatcggtaatgccggcggtcttttcctgcagcgtcagcgcgcgccatttggacatatcaaagatagtctgggtcagcgccagcgagccttgggtggtgttgctgttaagcccattggcatcgcggaagccgttgttataggtataaccggcagataagccaagctgtggcagcaacgggctgcgtgcctcgttgattttttcatacgccgcatcacggtcggcagcggttttacgcagatccgggttactttccctggcctgtttgtaaacctgcaacaggttctctgcctggctcatggtgctgaagcctgcgaggctcagaccaataagaagggggagcagtttcttcatttgcattccttgttgtgcagcaatattgctatgttagcgctgacgatagacgaatagttgccaattctagcagagtctgccgagcgctgagggtggcttaatgtgccatctcacagaacttttaccttggtgtacgctacgttgactgacacttggctatttgcatctgcgctacctgatatcatggttcacaatctaacacaaagcgggtgaagataaccccgccgtttctgtcatcaaatccctttattttgccggcataatcacacaggagaattcgtagatgaaacgctcgcaaccttcacccgttactttcgacaaaaatgatgtagaaattattgcacgagagacgctataccgtggttttttttcactcgacttatatcgctttcgccatcgtctgttcaacggcgaaatgagcggtgaggtcactcgcgaagtttttgagcgcggccatgcggcggtgttgctaccctatgatcccatcagggatgaagtcgtgctggttgaacaactgcggatcccggccatcgatagctcagcttctccttggctgctggaaatggttgcgggtatgatcgaaacgggagagagcgttgaagacgtatgccgccgtgaagcattggaagaggctggcgtggtggtggggcgctgcaagccggtgctgagctatctggccagccctggtggcaccagcgaacgtctgtctattatggttggtgaggttgacgccctgacggccgaagggatccacggattgcccgaagagcatgaagatatccgtgtccacgtggtcagccgcgaacaggcttaccgctgggttgaagaaggcgcgattgataatgccgcatcagtgattgcattgcagtggctggcgttgcaccatgaatcgcttaaagcagaatgggccaactaaatgcaaaagcgctatacccctgacttccccgaaatgatgagattgtgtgaaaccaacttcgcgcaattgcggcgtttgatgccgcgtaacgacgaagtcgatgaaaccgtcacttatcaggtgaatggcgcccactatcgtctgactattgttgaatctacccgttacactacgctggtgcagatcgagcagactgcgcctgcggtcagctactggagcctgcctgcgatgacggtgcggctgtaccacgacgcgatggttgcggaagtgtgttccagtcagcagatctatcggtttaaagcgcgttatgattatccgaacaaaaagttgcatcaacgtgacgaaaagcatcaaattaaccagtttcttgctgattggttgcgctactgtttagcgcatggagcaatggcggttccggcttgttaggtcgacggagataacaaaggacaccatttggaaagcctgtttagactgcccgtggcgagtggggccaaggtcaggatcctacaaataactgatacccacctgtttgctggcaagaatgagaccttgcttggcataaatacctatgccagctatcacgcggtgctggatgcggtgatcgcgcagcagcgtgagtgcgacctgatcgtggcaaccggcgatctggcgcaggatcattcccaggcggcataccggcactttgccgatggcatcacccgtttgcccgcgccctgtgtctggctgccggggaaccacgattttcagcctgcgatggtagatgcgctggccgcagccggtatctcaccttccaagcaggtgctgctgggggacaactggcaggtgttattgctggatagccaggtgtttcgcgtgccgcacggcgagctgagcgaataccagttggagtggatggaacgttgtctggaggctcatccagagcgctacacgctgctgttactgcatcaccatccgttgccttccggctgcacctggcttgatcaacacagtttgcgtaacccgcatacgctggcggccgtgctgtggcgctatccgaaagtgaataccttgctgtgcgggcatatccaccaggaattggatctgggttggcacgggcgtcggctgttggccacgccgtccacctgtgtgcaattcaagccgcactgcaccaattttacgatcgacgacgtttccccaggttggcgctatctcgacctgttgccagatggccgggtggaaaccctggtattccggctggaaaacgatgacttccgccccgacatggattcggacggctactgatgccttcaaccttactttacctgcacggtttcaacagctcgccgctttcggccaaggccacggctttcaaagcctggctggcggaaaatcatccccatatcgacatgctggtaccgcagttgccgccctacccggcggaggcggcggaaatgctggaagatatggtgatggcgcgggcaggccagacgatgggcgtcgtaggctcctcgttgggcggctattatgccacctggttatcgcagtgttttgcgttgccagcggtagtggtaaaccctgcggtgaagccgtatgagctgttgatcgactatctggggagcaacgagaacccctacaccgggcagcaatatgtgttagagtcacgccacgtttatgatctgaaagtgatgcaggtccatcccttggagtcgccggatttaatctggttgctacagcaaacgggcgatgaaattctcgattacggtcaggcagtggcttattacaccgcctgccggcaaacggtggagtcgggcgggaaccacgctttcgtcggtttcgagcactacttcccccagattgtggattttttagggctatgacgccgcagcaacttcagctatcacagatatactgaacaggcagcgggcgatttcggcaccttccctcaaccacgaaaaaataatcaacgatgactcaatccagctataacgctgatgccattgaagtactcagcggtctagaaccagtgcgccgtcgtcccggtatgtataccgacacgacgcgtccgaaccacctcggtcaagaggtgatagataacagcgtcgatgaagcgttggcgggccatgccaagcgtatcgacgtgatcctgcacgccgatcagtcactggaagtgatcgacgacggccgcggtatgccggtggatatccaccctgaagaaggcgtgccggcggttgagttgatcatgtgtcgtctgcatgcgggcgggaaattctccaataaaaactaccagttctccggcggcctgcacggcgtggggatttcggtggtcaacgccctgtccaagcgggtggaagtcaacgtcaagcgcgacggtaacgtctatagcatcgcttttgagaacggcgacaaggtgcaggatttggcggtgaccggtagctgcggcaagcgcaacaccggcaccagcattcacttctggcctgacgagcagttcttcgacagcccgcgcttctcggtttcccgcctgtcgcacctgctgaaagccaaagcggtgctgtgccccggcgttgaaatctactttatcgacaagctgaacaacaccgagcaacgctggtgctaccaggacggcctgaccgactacctgatggaagcggtgaacggcctgatcaccctgccggaaaaggcgtttgtcggcaattttgccggtgataccgaagcggtggactgggcattgctgtggctgccggaaggcggggaactgctgacggagagctacgtcaacctgatccccaccatgcagggcggcacgcacgtcaacggcctgcgccaagggctgctggatgcgatgcgcgagttctgtgaattccgcaatattctgccgcgcggcgtgaagctgtctgcggaagatatctgggatcgctgtgcctacgtgctgtcggtgaaaatgcaggatccgcaattcgcgggacagaccaaagagcggctctcttcccgccagtgcgcggcgtttgtttccggcgtggtgaaagatgccttcagcctgtggctgaatcagaacgtccaggcggccgagcaactggccgaactggcgatctccagcgctcaacgtcgcctgcgtgcggcgaagaaggtggtgcgtaagaagctgaccagtgggcctgcgttaccgggcaaactggcggactgcacctcgcaggatctgagcatgaccgaactgttcctggtggaaggggactcggcgggcggctcggccaagcaggcgcgcgatcgcgaatatcaggcaatcatgccgctgaagggcaagatcctcaacacctgggaagtttcctcagacgaagtgttggcctcgcaggaagtccatgatatctcggtggcgatcggcatcgatcccgacagcgaagatctcagccaactgcgctacggcaaaatctgtatcctggcggatgcggactccgatggcctgcacatcgccacgctgctgtgtgcgttgtttgtgcgccacttccgttcgctggtaaagggtggccatgtgcacgttgcgatgccaccgctataccgtatcgacctgggcaaagaagtctattacgccctcgacgaggaagagaaagccggcgtgctggagcagttgaagcgtaagaagggcaagccgaacgtacagcgctttaaagggctgggtgaaatgaacccgctgcaactgcgtgaaacgacgctcgatcccaacactcgccgtctggtgcagttgaccatcgatgacgagaataccgatcagaccatggccattatggacatgctgttggcgaagaagcgctcggaagaccgccgcaactggctgcaagacaagggcgataccgccgagctttcagtctgatgcctgtggggccgcaaccgcggccccacgtttttacattgtgccatccctggcgcactgcgtgctgcgcccgataacccagggcggaatgcatgaaaatcaccctcgaagaactattggcttatacctccgtgatcgacagcggttcgattaccgccgccgccgagcagcttggccaaaccacctctggcatcagccgggcgctgagccgtctggaaaaaaaactcgataccacgttactgcgccgcaccacacgtcgtctggaattgaccgaagaggggcagagctttttggcccatgcgcgggaaattatcaattcggtggaacatgccgaggagcagatggcgctacgtcgtctgaacccggcgggcaggctgcgggttaacgctgccgcgccctttatggagcatgtgatcgtgccgttggtcgccggtttccgccaacgtttcccacagattgagctggagctgaacaccgataacctgattatcgatctgctggagaagcgcaccgatatcgccattcgtattggcgcattgcgagactccaccatccacgcgcgcttgctgggggccagccggttacgcatccttgccagcccggactatattgcccgctttggggcaccgcagagtgtcgaagagctaaaccaccatagcctgctgggttttacgcaacccgagtcgcttaatctgtggccgctgcgccatcggcaggcggagcgctttgccattaccccaacgctatcagcctccagcggcgaaacgctgcggcaactggcgctacggggggaagggattgcccaattggccgattttatgacgcgggaagatcagcgggaagggcgtctggttcggttgctggcggccgaaacgttggatgtccgccagccaatcaatgcggtgtattatcgcaatgcccagttggccgcacggatcacctgttttctagactatgtcagcgcgcatatcaccgatgcacagatgtgagtcaggcgttatccagtacgtaaatggtcgtgtccagcacgctgtccttgatgatttcacggtgcttgagcatgtgatccgtctgtaggtgttgttccagatgcgcctggctctgccatttttccaacataaagatcgaatccggcgaacgcttctgccaaggtgcctgggtgtcggcgtcgatcattggctgatagccgccacagccctcttccgccaacaccgctggcaacagcttctcaatcgcttttaatacgctttcacgatgacctggtctggttctgatttctgcaattacggtgatcattacggcctcactggttaaaggtatgattgataaaatccatcacagttaagcaaagacttcgcccagatgtgcgcgcaaacgtgcgatatcgttggcaatatccggctgtttaatcacatcgttacagataaaggtcggcagtgcttccatccccaggaactggttggccttgtggaagtgcagataaacgccgtctacgcccacgccgtggaagaattggtcagggtcggtaaaggcttccaatggggcattccaggtcaggctcagcatgtaggtcttgccttggatcagcccgccagaaccgtattttttgctggcatcggaacgggtgcggccatcgctggcatacaggctgccgtggccagcggtgaacacttcgtcgagatattttttcaggatccagggctcgcccatccaccagcctggcatctggtaaatcaccgtatcggcccacaggtatttctgcacttcggcgtcgatatcatagccgtcatcgactacggtgacctgtacatcgtgcttggcatcgcgcaggaaagtttccgctacgtcgctcagggtctggttcagctcaccgttggagtggccgaattgcttcttggcgttaataatcaggatattgctcatagatgctgggttcctgtcagaatgtagaatgtgatggccgtaaggcatatcgttgaaacggagtgtaatccttcctgaagcagggaaaaatgcgatctagcgcacaacagtgttgactgtgagtcaagaaaggcggccactgatggcaaaatttcgcataaaccggggcgatcgccagcatcaatggccgatccacgcagcatctgtgacagccaccccgcagatgggttactatcgcgggcagaatcgaccctttgtcgtctgaggatatctgagtaatgagcgaactgactcatgacggtgttgagcgtctaccgctgcacacattcactgaaaacgcctatctgaactattccatgtacgtcatcatggatcgggcgctgccgtatatcggcgatggtttaaagccggtacagcgccgcattatctatgccatgtcggagctggggcttagcaataacgccaaattcaaaaaatctgcccgtaccgtcggtgacgtattaggtaagtatcatccgcatggtgatagcgcctgttatgaagctatggtgctgatggcgcaacccttctcttaccgttacccgctggtagatggccaaggaaactggggggcaccggatgaccctaaatctttcgccgcgatgcgttataccgaatcgcgcctgtcgaaatacgccgaagtgctgctgggcgagctgggccagggcaccacggactgggtgcccaacttcgacggcaccatgcaagaaccgaagatgctgcctgcacgtctgccgaacatcttgctcaacgggacgaccggtatcgcggtagggatggcaacggatattccaccacataacgtgcgtgaaattgccgccgcggcggtagccctgatcgacaagccaggctcatcgctcgacgatttgctggagtttgtgcagggaccggacttccctacggaagcggaaattattaccccgcgcgaagagatccgcaaaatttaccagaatggccgtggctcggtacgcatgcgtgccatctggaagaaagaagacggtagcgcggtgatcaccgccttgccgcaccaggtttcaggtgccaaagtgctggagcaaatcgccagccagatgcgcgccaaaaagttgccgatggtggaagatctgcgcgatgagtccgaccacgagaacccgacccgtctggtgattgtgccgcgctcgaaccgtatcgatctggatcaggtgatgaaccacctgtttgccaccaccgatctggagcgcagctaccgcatcaacatgaacatgatcggtctggacaaccgcccgcaggtcaaagggctggtggagatcctttccgaatggctggtcttccgccgtgatacggtgcgccgccgcctgaattaccgcctggaaaaagtgcttaaacggctgcacatcctggaaggtttgctggtcgcgtttctcaatatcgatgaagtgatccacatcattcgcagcgaagatgagccgaagccggtgttgatgcagcggtttggcatctccgatacccaggccgaagcgatcctcgagcttaagctgcgccatttggccaagctggaagaagtgaagatccgcggcgagcaggatgagttggctaaagagcgcgatcatctgcaggcgctgctggcttccgagcgcaagttgaacaacctgatcaagaaagaaatccaggccgatgcgcaggcttatggcgacgatcgtcgttcaccgttgaccgaacgtgaagaagccaaggccatgagcgagcacgattttgtgccttcagagccggtgacgattgtgctgtcgcaaatgggctgggtgcgtagcgccaagggccacgatatcgatccgagcggcctgagctacaaggccggggatagcttccttgccgccgcgcgcggcaagactaaccagccggtggtgttcatcgattcgactggccgcagctatgcgctcgatccgctgacgctgccttcggcacgtggccagggtgaaccgttaaccggtaagctgacgccaccgccgggtgcctccatcgagcaggtgctgatggctgcggacgatcagaagctgctgatggcttccgatgctggctacggcttcgtgtgtaccttcaacgatctggttgcacgcaaccgcgccggtaaggtgatgattacgctgccggacaacgccaaggcactgccgccgatggaaatccacggcagcgacgatatgctgctgtctatcagcgccgcaggtcgtatgctgatgttcccggtcgccgatctgccacagctgtcgaagggcaagggcaacaagattatctcgataccgtcggcgcaggccgccagtggggaagataaactggcctggctgttcgtactgccgccgcagacctcgatcaccctgcacgtgggcaaacgcaagctgaaactgcgcccggaagatctgcagaaattccgcgccgagcgtggccgtaagggcacgttgttgccacgtggcctgcagcgtatcgatcgggttgaggtggatatgccagagcgcgaatcgatgggtgacagcgaagagtaaatctcaacggtttcgcagaacgtaggggcgcagcatactgcgcccgcttaactatcgatcagacttttttcttggtttattttcttaagttagttaatttttccggctataaatttattgtgccgatcgctggctggcgggaaaatagagaacttagaagcgccgtgcgttcttctgcctgcgctcctcatacaaaaagaaatcttcgcggccgctcagtggccgggttggcagtgtgctaatgaggttgttatgttattgatattacgtgcgataatcgtcacggtctattgcctgttggtgagttttttcggttcgctttactgcttgttcagcccgcgtaacccccgccatgtagcgacctttggccatctattcggccgcttgtcgacagtgttcggcatccaggttgaactccgcaagcctgctggcgcggacaataacggcaaatgtatttacattgccaaccatcagaacaactacgacatggtgacggtttctaatgcggtacagccacgcaccgtgaccgtgggcaaaaaaagcctggtgtggatcccgtttttcggcccgctttactggttgaccggtaacctgctgattgaccgggataaccgcgctaaagcccatggcaccattgctcaggtggtggatgccttcaagaaacaggacatctcgatctggatgttcccggaaggaacccgcagccgtggccgtggcttactgccgtttaaaaccggtgcgttccacgcggcgatcgcggccggtgtgccgattgtgccgatctgtgtttcttctaccgacaagatcaagctgaaccgttggaacaacggccatgtgattgtggagatgctggaacctgtcgataccagtaattacagtaaagaacaggtgcgtgagctggcggcccattgtcgcgagctgatgaaggcgaagattgaccagttggatgcggaagtcgccaagttagacgccgccaaaaaataatagaacgcagttagctattttcatacggcctcatgccgtttatgccccgctttagcggggctttgcacacggttcagctttgttttcatggagaagatatgtcactcagtcgacgtcagtttattcaggcatcgggcttggcgctatgcgcgggaaccgtgccgctgagggccgaagcgagcgggatgccaactccgttaccgatcccgccactgctggaatcccgccgtggtcagccgctgtttttaaccctgcaacgtgcccattgggcctttatggacaaccgcaaagcgtccgtctggggcgtcaacggtatgtatctggggccgacggtgcgggtctacaacggtgacgacgtcaaactgatctacagcaaccgcctgcccgagccggtatcgatgaccatcagcgggttgcaggtgccaggtaccctgatgggcggtgcgccgcgcatgatgtcgcccaacgttgactggtcgccagtgatccctattcgtcaggctgcggccacctgctggtatcacgccaatacgccgaaccgtatggcgccgcacgtttacaacggtctggccggcctatggctggtcgaggatgaaatccgtaaaaacctgccgctgccgaaccattacggtgtcgatgatttcccactgatcattcaggataagcgcctggataacttcggtacgccggaatacgatcctccggcgcaggggggctttgttggcgatacgctgttggtcaacggcgtgcagaacccgtttatcgaagtctcacgtggctgggttcgcctgcgcctgttgaatgcctcaaactcacggcgctattcgttgcagcttagcgatgggcggccgatcaacgtgattgccagcgatcagggattcctgcctgcaccggtcgcggtacagcaactttctctggctccaggtgagcgccgcgaagtgctgatcgacatgtcgcagggggccgaagtgactctcaccgccggtgaagcggcagggatcatggatcgtctgcgtggcctgtttgaaccttccagcatgctggtttccacccaggtactgacgttgaaaccgacaggcctgttgccgctggtcaccgacaatctgccgatgcgcctgctggcagatcaactgctggatggtaacgtcagccgctcacgtgaattccgtctgggcgacaagatggccgggatcaacggggctatctgggatatgaaccgcatcgacgtacaaacgatgcagggcacctgggagcgttggaccattcatgccgatacgccacaggcgctccacattcagggcgtacagttcctgattaagcgcgtcaatggcgcgcagccgatggcggaagatcgcggctggaaggataccgtctgggtcgacggcgacgtggagctgctggtgtacttcaaccaggtttcctcggagcacttcccgttcctgttctacagccagacgttggaaatggccgatcgcggttcgaccggccagtttgtggttcaggcttccgcttaaacagccccgggcgtttgcagcattttcaggaacgccttcaccaccggagtggcactttcggcgtggtagatcgcatacagatccgccgaaggggccgcctgcaacgggcagaagcgtacgccgggccacggtatgcgcccgtagctgtccggcaatagcgtgatgccaaagccttccgccaccagcgccatcaaggtttgcggttcattgacctgatggacgatgtccggcgcaaagccatgttgcagacacaggttgtgcagatacagccccaggctggcctcgttgggcggtagcacgataaatttgtcatgctccagggcttgcagttggatttcttccccggttgccagtggatgccccgttggcagcaccaccgagatcttctcccgcgccaataattgacaggccagccccggcagcgcctgttgttttgcctcacgccagaccccgatatcgatatgccgcttctgcaatgagacgatctgctggctgggagtttgttcattcaacgtccaggtgaccttctcttcctgcccggtaaagcgttttagtgccgggatcaaaccgccccagacagaggtgcctaccatgccaatcaccatatggccggcctcgccacggcccagttgctgcacctgattgagcgcattgcccgcctgatcgagcaacgtttcgacgttatggaacagcgtgcggccagcctgcgtcagcgccatggagcgggtggtgcgtttgaacaactccacccccagctggctttccagctctttgatatgcttgctgagcggcggctgggacatgttcagccgctgtgcggcctgggtaaagttcatctcctccgccaccacgcggaaatagtgcagcaggcgaaagttgatccggctagggtcgggtagtggctttttcatggtttctcgggcctcccgatgcagggtatttataggtaaacagaataaatcagcgggcaacaatgtattggtcgccacccgctgtcgctctctactatggggatcaggctgtgtcccttaattgcacatgagcgccgctggaggtcatttggacgcgttgcaaggcacgagccgtgaagtttggtgggcccaaataagcggggagaaacgcagatacgcgtccaaatggccccagccctaagggtcgcgccccaaaagcccgtactcagcgttgtcgggcttgaacttagcccactaggccctgcaccctccgccttgattacgggcttttggggctgcgacggcaccatggtcaattaagggacacagcctaattcatccccctacagaagagaatactatgtttaatcaagatgatgctttttcttgtgccgacgtgctgcggaccagactacccggctttcaacctcgcgctgcattgattttgggatcggggctgggggcactggcagacgtaatgaccgacgccgtgaccatcgactataccgaacttccgggtttcccggtgagcggcgtagtgggccatgcagggcaactggtggcgggctggttggagggtgtgccagtgctgtgcatgaaagggcgcggacatttctatgagggccgtggcatgcaggtgatgaccaccgccgtgcgcaccttcaaactgctgggctgtgaattcctgctggcgaccaatgctgctggttcactgcgtaaatcggtcgccccgggtagcctggtggcgctgaccgaccacatcaactttatgccggaatccccgctggtgggggctaacgacgagcgttttggtccacgcttcttcagcctggctaacgcctacgatcgagacctgcgtgcgcagctggcggcggtagcggctaaggctggtatcccactggcagaaggggtgtttgccgcctacaccggcccgaactttgaaaccccggccgagatccgcatgatgcagacgctgggttgtgacgtggtggggatgtcgatcgtgccagaagtgctttcggcccggcactgcggcctgaaagtgttggtggtttcagcgatgaccaactatgccgaagggttatccgatacgccgctttcccatgagcagacgctgagctgtgccgcgctggcggcagacgactttatgcgcctgatccgtgagttcttcaaaacgctgtaatccttatttccatctgactaccccgcggcaagcccctaccttgccgcgtaaatcacaacaataaggtgatggtaatggcaataaaaacacgattgaaggtgatgatttttctccagttctttatctggggcgcctggttggtgacgttgggttcctacatgatcaacaccctgcacttcagcggggcgcaggttggtatggtgtacagttcgaaggggatcgccgcgctgatcatgccaagcctggccgggatcattgccgatcgctggatcaaggccaaccgtctgtatggcctgtgtcatctgctgggggcggtggcgttgtactacgccgcacaggtcgatcagccgatggtgatgttctgggtcatgctgttcaacgcgatggtctatatgcccaccatggcgctttccaacgctatctcttacttctgcctggaaaagcacggttttgatacggtcaaggatttcccgccggtgcgggtttatggcaccgtgggctttattctggcgatgtggctaatcagctttagccgcattgaactgagcaatatgcagttgtatctggcttccgcggtgtcgctgctattggcaatctactccctgacgttgccaaattgcccgaccaacaaggtgaaacgctcgcaaagctgggtcagcatgttggggctggatgcattcgtgctgttcaagcaaaaacgcatggcggtgttcttcctgtttgccatgttgctgggggcggcgctgcaaatcaccaataccttcggcaatccgttcctgcacgatttctcgcttaacccgctgtatcaggacagcctcagcgtgcgctatccttcggtgctgctctccctgtcgcaaatctctgaggtgtttttcatcctcaccatcccgttcttcctgcggagatatggcatcaagcaggtgatgctgatcagcatggcggcctggacgttacgtttcctgttcctggcctacggtacgcctgccgggttcggcttcctattgctattgctttcaatgatcgtttacggctgcgcgtttgatttcttcaatatttccggcgccatctttgtggagaaagaaaccgaccaccgcatccgtgccagcgctcaggggctgtttatgaccatggtcaacggtgcaggggcttacgttggagccatcgccagcggcgaggttgtggacttcttcacccataacggggtgaaagattggcagagtatttggctggtgtttgccgcctatacgctggtgctgggggtgatttttgccctgtctttcaactaccaacatcggccggaagcgatgagcggcgagctgcagaaggcgcattgaggtaaaacacaggggctgagttcagcccctgtgatatcaggcaggaaaacgctgttgcagttgttgccagtctggagctccggcggcaccacggctggccaccacgcaggcggccacgcggttggcaagatcgaccgcttgaaccaacgacaggccagcggaaagcccggctagcaaacccgcgcagtgggcatcccccgcgccgatggtatcaacgacgtcaaccgggtaaacgggcacatgctgcggttcattgcggccatcacagacccaggcaccgtcacgatccaaccggcagatcagggtaatgttatgcgctgtggcataacgttgtgcggcgctgacggcgtcgccttccccacacaagatcgcgacttcgtcgcggttgagggtgagtaaggtgtggctatcgctaagcatggcgaaaaacgcttcacctagttgatcgacgcgcgggccgggatccagcagccgccactgatcgaacggcaggcgggtaagccagtctctcagtgcttcaccgggttctcccaccagttcatagccgttggcatagaccaccgtttctggcgttagcggcagggtggccagttgcgccttattccaatgggcttcacaaccggtcacggtaacaaaagtacgttcaccgttgggttccaccaacgccaggcaccaaccattatccagttggccgtggcgtagcagcaccggcagatccagttcctgcatggcggcttcgatggccgctccccagtctccgctaccaaccggcataccgttaatcacggggacatccaggcggcgtagcgcccgtgctacgttgaaggcgcaaccgccaatctgtcgctcttgtggctgcgcttcgatatcttcaccgctggctggcagctttggcagcgtgaggaccacatcacctacggcaccgcctaccaccagaatgggttttactgcgacaaattcactcattgctgtcctttgttacttgccagatagaggccataggcaaccaggctgaccaggaaggaaacgaacagccccaggctggaatcagcgaacaggcctttagccaatgggccatcgataaagccggttttggtcactagcagcccgcacaaggcgccgaggaaccagcagaatagtggcaccttacgcacgccgcggttctggccgttcagaccgtacagggcattaccgtcataaccatgatgacggcgcactttagcataatcgagaatgaaaatggcttcccaggcggcaaggaataccccacagaacaccaggaaagagataaatggccccataaagtcgccagaaataaacagcacatagatggcgatgccaaggatcaccacggcgtcaatggagacggccagcgattgtttcaccttcacgcctagcgttagcaggttaagactggcggagtagaggctgagcacggcaatagtgacgataccggcggtcgcggccaacagataagggatggccatccactttggcagtaccgagccgattaacgcaatcgggttggcggcgctggccagatccggcagctgtaccgaaagcagaatgccggtgaacatcagcaggatcaggggcagacaggcaccgcccactacggcggcaaagatgcttttatctgaagattctgggctttgataacggctgtaatcggccccggcaatggcccagctgataccggtacctgctgcgatcaccgaaacggcaggcaggaagccggtcaaccaactgccggaaggcagtgacagcactttgccccattcggtggtaaagacgatatacagcaccacaatcagcgtcatggtgccgaatatccggctgaaccagctctgcatccagactaccgtgttctggcccagcaggctgaccacgatggtcaagccaccaaacagcaacaggctgaaagcggtaagggaatggctttcacccaggcctatggcctggaacagcgccgccagggtgagtgtgccggtgatgacgttcaccgcttcccaacccatcaggttgatccaactgaaggtggtgggggcaatgttgcccttcaggccaaaaatcacccgcgataaggtcaaagtagaggtacggccacgtttgccggcgaagctggtgtaaccgaccaaagcaaaactggctaccccgaccaatgcggccaggatggactggataaaggacaggccaaacgcgacaataattgccccgtacaccacgccaagaatgccgatgttggcggcagaccatatccagaacagctcgagcggtttacctgtctgctcagcatccggtacgcgatcgatgcctgtgctttctactttccatgtctcactgcggttgatttcactcatagtgcgatttattcctgttttcgcagcctaaggagagcggccgcgtagggctcaaaatctatttgattggcgctattgatcgtggcaatccactccgccgggaaggcggttacgccgcgtaaggctccgcagattgccgttgccatggcaccaatggtatcggtatctccacccagattggcggccaggatcgcacaacgttgcggatcggtgtctgccagttcaaccagtgccaacgccatcgggattgactcgatagtgtccatcccggcaccgacggtatggtaaagctccgccaatgcttcgctatccggcagatggcccaggttagcggtgaactccagcgcccaaaccagacggcggctgagcgaagggctgaaagtggtgatatgttgctgttgcacctgctctacccgtgcgggcagttcttgcttgatggtggcccaatccgcgccttcgacagcccggctaacggcccaggcaatggcaaaagcgccagctacggcgatatccgatttgtgggtcgggctgcaagacagccttaccgctgtgataaaggctggcaaatcgccgcttggcagcaggcaacctaacggagctacacgcatggccgctccattggtcacgccgttagcggcgatctctgccaccggcgtaccggcgcggaacgccaacagcgcggctttggagctggggccgaggatatttttctcaaaggctccgatccgttctgcccacagcatgatgtggtgagctatacgttccggctcgacccggccctctgcggccaacagcgcatccatcaaggccactgcctgctgggtgtcatccgtgtattccccggcgataaagccgtttgctgcgatattttctgccgggccaggcaggaagctggtgatccaaccaaaataatcaccaacctgctgccttggccacagttctgacggcatccccatcgcatcgcctacggcttgcccatagagcgccccgagtatggcgtggtgaggattttttatatttttcatttatatgggtgttccctggtgttggtgctaaccgatgcaaaacatcagtgtcgctaatgttagtcgtaaaatagatccaattaaagtccaatagttgaaaaatgtgattccaatctaagtccaatgcaagcgcgcatgatgtaattaccttgaatgtgacaaatatggtaaaaacgaggcggttgaggaatgcgaacaaatcagaggtgggtccgatgaatgattttattgcctggctgcgtcagcagttttcacaggcagcggcggcaccacgttacatccagttggcgaactccctcgaaattgccattaaacagcgtgtcttgggcgttggcgattttttaccgccggaacgcatgctggctgaagcattggatctgtcacgcgttaccgtcagtaaggcgatgaggttgctggaagaaaaagcgctggtctcacgccaacagggcattggtactcgagtggctatgcacatcggctattccctcaatcaggataacggctttaccgcgcaggttttgcgcagtggcagcagcgtcagtaaccaatggctgttgcgttcctgcataaaggcacccagcgaggtagccaaggcgctggagttggcaagcgacagtatcgtggtcaagctacgtcgcctgcggttgatggatggcaatccggtgtcgttggaaaccacctatatcccgacccgttttctgcccgatcccgaagagctggagcactcgctgtatgccctatggaagtcgcgaggcattgtgccagagggcaggcattttttattgaaggcggttgccagcaatgacgagaacgccagcttgctcaatgtgcaaagcggcacaccgctgttacgcattgtccagaccagccgcaacgcccagggcgaagtgctggagttcagcgaaacgctgtgccgcagcgatgtgtacgagtttgaggtcaaaagctgagtaatctgagaaataaccatgctcttttggcggcgagtgcgtataatcgccgcccggcgataaattaacctgcacaagagcacccgaatgagcactaccagcctgatccaacccgaacgtgaattgttctcctacgagccttattgggccgaatgttttggccccgcgccgtttttaccgatgtcgcgtgaggagatggaccaattaggctgggatagctgcgatgtgattgtgatcagcggggacgcttacgtcgatcacccaagctttggcatggcgattgtgggccgcatgctggaggctcagggcttccgcgtggggatcattgcccagccggactggagcaacaaagaagactttatgcgtttgggcaaaccgaacctgttcttcggcgtgaccgctggcaatatggactcgatgatcaaccgctataccgccgatcgtaagttgcgtcatgacgatgcctataccgccggtaacgtgggcggcaaacgaccggatcgcgccacgctggtctatagccaacgctgtagagaagcctataaagatgtgcccgtcatcctgggcggtatcgaagccagtctgcgccgtattgcccattatgattactggtcggataccgtgcgccgctcggtcctggtggactccaaggctgatatgctgatctacggcaacggcgaacgtccgctggtggagttggcgcatcgcctggcggcgggtgaaaaaattcaggatatccacgatatccgtaacaccgcagtgatgcgtaaaggggccatgccgggctggagcggggtggattccactcgcctggacaagccgggccgtatcgagccaatccctaatccttacggtgaagatttgccctgtgccgatggcagcacgccagagccagaggccaagccggtcaccgtacgtgccgccaagcccaagccgtgggaaaaaacctacgtgctgttgccttccttcgagaaggtgaaggcggacaaggtgctgtatgcccacacttcgcgcatcctgcatcatgaaaccaaccctggctgcgcccgtgcgttaatgcaaaaacatggcgaccgctacgtgtggatcaacccaccggcgatcccgctcaccacgccggaaatggacagcgtgtttgccctgccgtatcagcgtgtgccgcacccatcctatggcgaagagcgcatcccggcctacgatatgatccgcttctcggtgaacattatgcgtggttgctacggtggctgttcgttctgttcaatcaccgagcatgaagggcgtattatccagagccgttcggaagactcgatcgtgcgtgaaatcgaagagatccgcgacaaggtgccgggctttaccggggtgatctccgatctgggtggcccaacggccaacatgtatatgttgcgctgcaccaacccgcgtgccgagcaaacctgccgccgtgcttcctgtgtgtatccggaaatctgtacctatatggataccaaccatgagccgaccatcaaactctaccgccgcgcccgtgagctggaagggatcaagaagatcctgatcgcctccggggtgcgttacgatctggcggttgaagatccgcgttatatcaaggaactggcgacccatcacgtgggcggctatctgaagatcgcgccggagcataccgaaaccgggccattgtccaagatgatgaagccggggatggggagctacgatcgcttcaagcagctgttcgatcagtattccaaacaggcaggtaaagagcagtacctgatcccttattttatctcctcgcatccgggcacccgcgatgaggacatggtgaatctggcgctgtggctgaagaaaaaccgtttccgtctcgatcaggtacagaacttctacccgtcgccaatggcgaactccaccaccatgtattacagcggcaagaacccgttgggtaaggtgggatataagagtgaagacgtgtttattccgaagggcgatcgccagcgccgcctgcataaggcattgttgcgctatcacgatccgcttaactggccgctgatccgtacggcgttggaagagatggggatgaagcacctgattggtggccgtcgcgaatgcctggtgccagcaccgagcattgacgagcagcgcgaggccaagcgcttacagcggcatacccgcccggcgttgaccaagcacacggacattacccgccagcgcacaccgtccaacaagccaccgcgcaagcctatccgcaacggtaaggcctgatagagcagggagcccaagtggctccctcgtactagccctctccctgagggcatagctttctatacatcacttaaaaactttcaatagccgctggatccagaatcgtgatttatccccttgtggggatatacttgtcattatccctttgtgaggatatttattcctttatcctcatcagaggatatactgataattatcctttagtgcggatacctaggaggtcagtgtgatgagtccaccaaaaatttatagcccggcccaactggcaaactatctaaaactagtgcggcagagaaaccattggacgcaaagcgatcttgccggtcggatcggtattaagcaggcaaccatttccaacttcgaaaacaaccccgaaaaaacaacgctaactacgctgtttaaaatattgcaatcacttgaaatgtctatggttgtatgcgaaaaaaatgatatgacagccgtctgtgataaggaaaatcaacaggagcttgactggtaatggcaacgcttattacgtggatgaacaacgaactagtcggtgagttgacgaagcagacaaccggtgcgcatacgttcagatatgatgatagttggatgcgcaatccgcgcgctaggcctctttctctatctctgcctttagaggtaggcaacatcacatctgatgcggtgattaactactttgataacctgttgccggacaacccaaaggttcgggagcgaattgttaaaaggtatcacgccaaatcgacacaaccctttgatcttcttgccgagatagggagagatagtgtgggagctgtgacgttacttccgccagggaaaactgtcaccgaactgacattaacatggcagccactggataagatccgactggaaacgttactcaccgcataccaatcagatattccgcttggcatgattaatgaagaagacgatttcagaatatcggttgcaggtgcccaggaaaagacggcgctgctgaagattaatgaggattggtgtctcccgagtggaatgacgccaactacccacatcattaagctgccgatagacgaaataaaacagcctaatgccacgctggatctgcgtgagagtgttgataatgaatatttatgtctggcattagcacgtgaacttggatttgctgtgcctgataccgagatcatcaggactgagaccatcagggctctggcagttgaacggtttgatcgtcgctgggtgaagaacagaaccgagttgcttcgcttgccgcaagaagatctctgccaagttttcggtctgccctcatcagtgaagtatgaatcagacggggggccaggaattgccaagatcatggattttttgcttggttccagcaccgcgttaaaagaccgatatgactttatgaaatttcaggtttttcaatggctgcttggtgcaacggatgggcatgcgaaaaatttctccatttttattcaggcaggcggtagctttagattaactcccttctacgacattatttctgcctttcccgtgctcggtgggcaaggtttacatatgagcgatcttaagttggcaatgagcctgaaagccagcaagggaaggaaaaatgagattggcaagatctatccccgtcactttgtggcgacagcaaaggaggtgaatttccccgcagagcaaatgatggagatcctgcattatttcgcggagaacgttccgagagccatcgatgcggtaacaaaaactttacctggcgatttttcaacccatgtctaccgctccatcgtgtcaaatttgcagaaattccacggtaggttatcagggatagcctgagtattctggctacaaactgttatacgccgcctcgaccttcagcatataacgcggtgcctgtggtgacggatggtactggcgcacatgccagtgaaaggcctcgggtgacaggttgttgatcattctgatggctttttggcgatcgctggagaaggtacgtagcaaggctcccgcgccgttggcataagccacctcagtggcatagcggcgggtcaccggatcgtcaatccatttcagttgctgctgttgcagcgccccgatataggccgcccccagatcgatattggtttctggatccaacaggtcgtcatcatccgggcagccgcgtttgcctttaaaacggtaggcatcacaaccggcggtgttcgccttaagctgcatcaggccgatggcgttggaagggctgacagctttagggttaaagccggactctacctgaataatggcggcgatcagcttgcgatcgattttgtattcgtcggccgcgtcttcgatttcatcgtcataggcgtgaggattgtggctggtgcgctggtgcttgctggaacagcctgccagcaccaatagcattaacaccatggtcaggcgcggcaaagatgagaaagagaaagtcatgaaactccaagctgctgtgatcggattgctgcgccatatcatagcgtcagcgaccgataagatcttgggttaagagtcaattaacgcgagaggctaccaacaatatagcaacggggccgacagtgcggccccgccatgtttacagagaatcaggatccggtcccaggcggttgccgatatccagcttggtgatttcgcccagttcgtccttatccagtttgaaatcaaacacctcaaagttttcgcgaatgcgtgctggcgtaaccgatttcgggatcacgatcaggccgctgtccagatgccagcgcacgacgatctgtgcaggcgtcttgttgtacttctccgccagcttcttgatcaggggttgatcaaagacgccttcacccccttgcgccaacgggctccaggattcggtggcgatatggtgggtggcattccaggcgcgcagctggcgctgttgcagcagcgggtgcagttcgatctggttgatcaccggcgcgacgctggtttcatccagcaggcgttgcagatgtggtgtgtggaagttacagacgccgatgcttttcaccagcccttgctcacgcagtttgatcaagccgcgccaggcttcgacatactgatcctgtgccggtttcggccagtggatcagatagagatcgacgtaatccagcttcagctttttcaggctggtttccagtgctgcctgcggattgccctgatcgtcgttccacagcttggtggtgataaatagctcttcacgtgggatcgaggtagcttgcagcgcggcacctaccccttcctcatttttgtaaatcgcggcggtatcgatggagcgatagccgacttccagcgccttggtgacggcctgcgtggtttcttcaatgctggcttgccatacgccgagacccaattgcggcatcagattaccatcgtggagtttgatgatgggttgcatgcgttatctccttatgactgctttcaggccaaggcctgcttacatgaattttagttcgccacctcagtgcttgccgagtttgcgacctcaagcgtgcatatccagtacgatacggtaacgggccttgcccgcctccagatgcgcgatggcatcgttgaccttgctcaatggaaaatgttctacctgcggctctatgccatggcgggcgcagaaggccagcatgtcagccaggcgtgaaggggcgccggtaggcgaagcggaaagttcagcctgtttgctgataaacgagaacacctgaacgggtaccgggtcggggatcgccccaacgaagtgcaggcggcctttcggggccaaggtaccgataaaggcgtcccaatctaaagaggcgctggcggtgaccagaataaagtcgagttgattggcaatggcctgtaatgcggcgctgtcattgcttgccactacgcggtgagctcccaacgaaagtgcttcgtcgcgtttgctgttggatgaggtgaaggcggtgacttcacagccccaggcgtgcataaagcggatcgccatgtgacccaggccgccaataccgaccacgccaacgcgctgtgtcgggcggacatcgtattgcaatagtgggttgaacaccgtgatcccaccgcagaacagcggcccggcactggtcacgtcaacgccttccggcagtgggatcgcccaggcccagtggctgcggatgcgatcggcaaaaccgccgtggcgaccaataatggtaggttgtacctcgttgcacagatgctgatccccagacatacaggggtgacagtgcatacagctgccgcgattccagccaacgcccaccacctggccaatcttcagccctttgttctgcgcatgggcacccaacttggtgactttacccaccacctcatggccgggtacgaacgggtagtgggtcatgccccattcattgttcagcatggagagatcggagtggcagacgccacagtaatcaatagcaacttcaatctcatcgtcgcctaatgcaccggcgtcgaaggtaaaaggttcaagcggctgtccctcgccgggcgcggcccaggcacgaatgctattgtcagatacggagctggattgattcgccataaaattctcccatgggttaacgagacgatgttatgcgatgcgatcgaaagcgcggataaggcgcacaaccgtgcccgatgatcggtcgggcacggtaagtagaaactaaagcctagcaggaaactgtgatgttgcgatgaaatcgtgtgctggcaattagcgtgccgcttgataaatgcgttggctgacttccagtgtaatatccccatgctcgcccagcgcggtcataccgtgctgatgcaatttgtcgagcagcgcagggatagagctaccgtcgagttgataatcagacaggcgggttggcacgcccatttgctcaaagaaggcacgggtggcggcgattgcaccgtcgatacggctttcttcggaaccctcacgcaggccccagacgcgatcggcgtactgcagtagtttttcgcgtttctgggcttttttctctaccagcaaggcaggcaggacgacggccagggtttgcgcatgatccagaccgtgcatggcggtcagttcatggccgagcatatgcgttgcccagtcttgtggcacaccggcaccgatcaggccgttcagcgccatggtggcactccacatcacgttggcacgcaccgcatagttttccggttcggccagcgcacgtgggccatcttcgatcaacgttaacagcaggccttcggcaaagcgatcctgcaccttggcatcgaccgggtaagtcaggtattgctcaatggtgtggacaaaggcgtccactacgccgttggcgatttggcgcggtggcagtgaataggtcaccaccggatcgagcacggcgaacagaggctgcaccagcggtgagaagaagtgctgtttgtcaccgctgcttttacgggtgatcaccgcgccgctgttggactcggagcctgtcgctggcaaggtcagcacgcaacccatcggtactgcgctgacgatctcgctgcccacggttttcaggatatgccacggatcgcgatcggcctggtagtcggccgccgccgcgatgaatttggtgccatcaaccaccgagccaccgccgactgccagcaggaagtcgatcttttctgcccgcacgatttctaccgctttcatcagggtttcataggtcgggttaggctcgataccggaaaactcctgtacgttgcggccagccagcgcggcatagacctgatccagtacgccgttgttcttcacgctgccaccgccgtaggtgatcaggatgcgggcgtctgccgggatttgtttgcctaattcggcaatctggcctttaccgaacaggattttggttggggtgtggaggatgaagttttgcattatcgtattctcttttcgtgtcagggaagcgccagcggcgcaaaatagctggagtctattgtcggtaacctggcccgctcgcacaatgcacattcctgtcggtgtcttgcctatttctacactacactgtagaaaaagcatctttatggttattatgcgtgtcgaattattcaggcgattagaggggcttgctgatggagaacgttgaattacgtagccgtatggcgcgccaggcgatgcgctttgccgccgccaaaggctatagcccaacgcccgtacctatggtgaaggtgttgtatagcgatgaatattacccgcgtcagccggtgatgtatgaacctggtatcgtcatcatctttcagggccacaaggtgggctactgtggcagcaaggtgtttcagtacgatccgcgcaattacctgctgatgacggtatcgctgccgtttgagtgtgaaacttttgccagcccggaacagccgctggtggggctggcggtcaatatcgacacccagatgctacaggatctgctgatcgatatcggtgatgacgattatctgatgcagcctaggggggaaagcagcggcgttaatctctcagtgcttagcgatgaaatgctgtgcgccaccgagcgtctgttggacgtgatggagaaaccgttggatgcgcgggtgctggggccacagatcgtgcgtgagctgctttattacgtgctgcgtggcagttgcggtgcttcgttgcaggaactggttaaccggcatacccatttcagccagatcgccaaggcgttgcggcggattgagaatcagtatgccgagaacatcaacgtcgaacagttggcgtacgaagtgaacatgagcgtgtcggcgtttcaccataacttcaaggcggtgaccaatacctcgccgctgcagtatgtgaagtcgtatcgtctgcacaaggcgcgtttgctgatgctgcatgacggccttaaggccagcacggcagcgatccgcgtgggctacgagagcgcttcgcagttcagccgcgagtttaagcggctgtttggcattacgccgagcgatgagatcgcccggctgcgggacaatagcgccatcatgcagggttaacgcgtcagtacgattttgccgaacgggccgcgatcgaggtgatcgagcgccgcgggtagctgatcgaaacggtaacgctggtcgatgacaggcttgatgccattggcgtcgacggcgcgtaccaaatcttccaatgcgcggcggtggcctacaccgatgccctggatctgcggcgatttcagcagcaataggctagctggaatggcaatatcaaaaccctccagcacgccaatgaccgagatacggccatgtatcgccacggcgcgtagtgaattgaccagattgctgccaccaacggtttcgacaatatgatcgataccgcgatcctgcgtcagttgatagatcgactccacccaatcctctcgcaggcggtgaatgccgtgatcggcccctaacgccttggcacgtagcagcttctcttcgctgccggaggtgacaaagacctgtgctccgtgggctttggcaatctgtagcgcgaacaaggcaacgccaccggtgccttgtaccaataccgattccccggcacgcaaatgaccgcgttctaccaaggcaaaccaggccgtcagcccagcgcagggtaaggtactggcttcggcatcgtctagcgtgccgggagctgcgctcagccagttttcatcgaccaccacgtattcggccagcatcccttgataggtaccgcctgccgtacggtaaggtggaatgcgcgcatcaccatcaggcttaccctctatccagtccgggctaaaggtagagatcacccgatcgccagagcgaaaacgcgtgctgccgcttcccaccgcgtctaccacgccagccatatccgaggctggggtaaacggcagcggcagatccaacggcatggtgccttctatcaccattttatcgcggtaattcagcgctacggcgttcactttcacccgcacctgatgtgggccgggctgtggaatggcgctctcggttaattgcagatgttcacgccctacggcgttcatcgtccaacgttgcatggtttcggtcatgaggtgctcctgatgggttgaagatattcacagataatagcgttgatttaaaatcaccagtggcgataaaatttcacaagattgtttcctaaaaggctacaagtgatgagtgaccgattaagcggcatttcggtattggtcagcgtggtggaggcgggcagttttgcgttagcggccaacaggttgcatctctcccgttcggcggtgggcaaaactattgcccggctggagcaacggttgggtgtgcgcctgtttcaccgcaccacccgcagcctgaatctgactgacgatggcgcgctgttctatgagcgttgtttacgggcgttggaggagatccgcgtcgcagagaacctgttggaaagcggtaagcggcaggtcagtggccggttgcgggtctcgatgccggtgctgattggccgcctgtgtatcgcgccggtgcttaccgcattgtcgcgtgagcatccaggattggaactcgatctgtcatttagcgatagggtggtggatttggctgaggaaggattcgatctggcggtgcgtaatggccctttgccggacagtgccgggctggtggctagaaggttaggggataaccgcatgaccctatgcgcctcgccggagtatctggctcgttgtggtaccccggcgagcgttgaggagttacaacagcacgatgccatcgcttatcgctacgcctcaatgatacgtagctggttgatcccgcaggcagatggaacaacgcgagaagtgatgccaaaacctcgcttgttgatggacgatcttcaggcgattgccgacgcgtcggtggcggggtttggcattgcctggctgccatgctggctaatccgtgatgccttgctggaaggtcgattacagcaggtattgggggaggtaccggggaaagactttgaagtgcatgccgtctggccgctcacgccgcatttacccttgaaagtgcggctggcggtggatgcgctggtcagccacctgcccgcgaggatggcgctatagtcgcgccttccggctcagcaagaagaacgcagcgcaagatgaaataatagtaaaaagcgagagtatcaacattagggtgctaaagccctcctggtatgcggtcagtacctgcgcatggtctagattttgcgagaggctcatatcccccatgattaggcgttggaccagctcgctattatcattctgcggttgcagcctaaggaggctgctgttgaccagggtagtgagcatggcaatggagattgcaagtgctataccttcaccagcgacacgcgtggtgttaaaaattccagcggccatacctgcttgttctttggggacaacgtttaccgctagcccatccattagtccccaaggaaaaccagctccgataccgatgatcagcatggcaaaaatcaactgcaggtgatcgccgatagggactcgactgaggatatacagccctgtggccgccagcagaaaaccgaagccagagagggagcccgcagagatccaacgggttaaccaggcagccagtaacggcaccaccagcatcggtgtcgaaagtgccagcatgaccaagccactttgtatgggggaaatcccttcaacgccgatcagcctgaatggcagcagcactatcagaacgatgtagcaatagcaggttcctaacggaagtaactggacaccgatgaaacgtgtgtgcctgagcaggctgagttcgagcatcggctcttttgagcgtagctcgataaccacgaaagcaatcaagcaagtcagcgcgctgataagtaagctcacgatcaacgatgaaccccatccagcttgcggggcgaggatgatcccggtggtgaaaagtacgagcatcgctgaaaaactcgccaaacctggaagatccagcttttgagcctgcggattcttgctttcgtgcatctgtgaaacggcggcgattagtgccgttgcagcgaatattgcggtggtaaagaagatcgaacgccagccgaattgttcaatcagcgcaccagtaatcattggaccaaatgccaggccgaggccgaaggtcgttcccagcagactaaaggctcgggttctgtcatgcccttcgaattcttgtgccagagcggccgaaccgctagcgagtgccgcagcggctgctatcccctgaaccgcccgcaatatatccagccagacaatgctggtggcattggccagaagtaagctgacgatgatgaatagcagaaggccatgggtgaatatgcgtttgcggccataaatgtccgaaagcgtgccggcggccatgagtaggctaccgaaactcagcatgaacgcgttggttacccaggcttgggcagatgggctggcgttgaaaaccttgctgatggttggggtggcgacggcacccccggtgaaactcagcggtaataccaaggcggctaggcaaatagcaccgagaacgtagtaacggcctttttgtagagagtgatcggaattgttacccattgcgtaatccctcatttttgtagcaatctgggaaactaaatctatagaggtcgcaatcttgaataaatgggttaaaactccacttataatgaacaaaaaggtcttaattctatggagagcctgaccagtatcctctcgttcgtgaaaaccgcagaatcgctgagctttgtctctgccgcacgtgccataggcatttccgcgacggcggtaggaaagaatgttgcgaggcttgaagcgtctctgaacgttcgcttgtttcagcgcagtacccgcaaggttagcctcactgttgaaggggaaatgttctacgagcgatgtcggaaaatccttgatgacttgcaggacgctgaggccatgctgtcgcattcggttcaagctccccgaggtcgtttgcgggtcagtctacccaccatcgggtaccgctttctgttacccatgatgcctgactttcgcaaagcctacccagaagttgagttagagttagatttcaacgatcaacttgttgatctcatcaatgatgggtttgatgtggtgatacgaagcggtgatcttgcggactcgcggctgatgtcgcgtaggcttgggcctttccgttttgttctgtgtgccgcccctggttatctggaacgtaaaggacgacctgagaagttgctcgatctggagttgcacgattgcctacgttaccgttttgtcacgacaggtaaaatcatggattggacattaacgtcagacccggaaataactcagttgcgtctaaattcttcccttacgttgaataacatggaggcaatgctgacggcgaccattgacgggcatggcattgcttacatgcctgattttttagtcaaagaggcgttggccgtgggcgatattgagacgttgcttgatgctcacaccaaggatcaagggttcttttgggcgctctggccctcaagtcggcatctatcaccaaagattcgcgtatttgtagattttatctgcagccaactttttaagtagggataagaggcatgacgatatgggttactatggcggtgggcaaaaccgccacctgactcaggaggcgcgttttttacgccaaacgaccagcatcacgcccagcagtccaacgaccaacagcaccatcggcaggatcatcagcccggccatcacctgatcttcatggcgtttaaccagcgggatttggctaaaggcatagcccaatgtgactaccgaacctacccacagcaagccgctgagccagttaaagatttgaaaacgggcgctattgaggcccgaaataccggccatggtaggcaacagggtgcgtacaaatgcaaggaaacggccaatcagcagagcgaccaggccgtggcggttaaacagcatgtgtgcgcgctggtggtattgcgccggtagctgtagcaaccagcctttcaccaccgaggtatggccaagccatcgtccttgcagatagctgagccaacagccaaggctggcggcgaccgtcagaataatcagcgtggggataaagttcatcacgcctttggcaatcaaggctccggccaacagcagtaagctatctccgggcaggaaggaagcgggcaacaaaccgttttccaaaaacaaggtggtaaaaaggacggcataaaccacccaaatcacgctgggatcggcaagtgcagtaaagtcttgcgtccacagtgcgtgaacaatctctcttaatacatccattttttatcctgaggtgcctgggctgactttctataggctaccgtgctgtcatagccatgctcaccggtaaatttaggccacacacggcggtgaggcccaagagcacaatatagtgtaccgctattagcttaagcggacattaaacagagcatagaaaatgtggcaaaggccgtaaaactcggaaaaagtacaggcgaccgttgggatggccaagttaaacgccgtaaaacctcgtgccttactgtgtgattttattctagccactcctcatcaaccggcgactctacgtagatactttgcctactgcgttcgtctggtcatccaataggcattttcccgcagtgatggcgtgaattattgacaccatttatggcctgttggggtaaaaagccgcagttcgagtgatgattttgttagcattatgggtaggcaatgttatgccaaacgacgcgcaaaccctgatagtgactgggggtgtatcattttttgctcgtcgatgcgtaattcttcaaataataatgataactactatcaatccctgattggtttgatatgatcgcacgctgaattcttccttaaatgttgaaataggtggaggcacagcgtgaaaacggctggcaaaatgacaaatctaagtgctcagggcgcaggccgtgggcaatggggcggattggggcgcagtgtgatcgcctcactggtattggtggtggggttggcgggcaacgctcaggcggctccggccactgcaccagcagtcgctgaaagcgttgccgcggcaacgacaccggccacaccaacagcggtaacccctgtggcgggtaccccggaaaatatcaccccggttaatcctgaaccgaccatccaaccgcctgaaacgcgtggtatggacctttccgtctggggcatgtatcagcacgccgatatcgtggtgaaaatcgtgatgattggcctggtgctggcgtctatcgtcacctggaccattctgtttgccaaaggcagtgagctgtttcgttccaagcgccgtctgcgccgtgagcagttggcgctggccgacgtgcgttcgctggacgatgcctccgaactggcgcaaagcttctcgcaagagagcatcagtgcggtgttgctgcaagatgcgcagaacgaactggagctgtcggcggcttctaacgacaacaacggcattaaagagcgtaccggtttccgtctggaacgccgcgtagcggcctacgggcgtcagctggggcgtggcaatggcttcctggccaccatcggcgccatttcaccgtttgtcggcctgttcggcaccgtatggggcatcatgaacagctttatcggcattgcccattcgcaaaccaccaacctggcagtggttgccccggggattgcggaagccttgctggccaccgcgctcggtctggttgcagctatccctgcggtagtgatctacaacatctttgctcgcgttattggcggccaccgtgctcaggtgggcgatgtggcggcgcaggtgctgctgctgttgggccgcgatctggatctggcggcctcggccgatgccaaacgttcgcagcatgcgcaccaactgcgggtggggtgagttatggcgatgcgcttaaatgaagatctggacgacagcggcgaactgcatgaaatcaacgtgacgccgtttatcgacgtcatgctggtgctgttgatcatctttatggtggctgcgccgctggcaacggtagatattcgtgtcgatctgcccgcctcttccgctaaaccgcagccgcgtccggaaaaaccggtgttcctgtcggtgaaggcagacaagcagctgtacgtgagtgatgagccagtgacggcggaacaactgacggcggtgctggatcaacgcacgcaggcgaataaagaaaccaccatcttcttccaggcggacaagaccgtagattatgaaacgctgatgagcgtgatggatacgctacgcaaagccggctacctgaaagtggggctggtgggaatggaaggcgtggccaagtaatctgaaactcagccatttcctcttcttcgggttgcctaactcgaggaagagggcgctattacctgtttatccccgcgaaatctgcccccctctcctcgaattcccatgatactcctgacaacctcaatcgacttaacccattgattatttcaacgggccagcctgcagcgcccctacgtggtgagccggttgatattttctcgggctatttagccacgagcatgtgccgcagcacgggtgatttgctcatcggtggggcgcacgccggtgtacaacacaaactgctcgaaagcctgtaatgcgatcacttcggcaccggtcaccacctgcaaaccctgttcccgtgcatagcggatcagcggggtttctgctggcagtgcaacaacgtcgaaggcgattttcgcagccttgatagtggccggttcaaaggccaactgctcggcttcgctaccgcccgccatgccgatcggcgtgacgttaatcaccatctcagcctgcaagtcgcccacttctggctgccactgataaccatattgcgctgccagcgcctggcccgcctgtgggttgcgcgcaatgatatggccgttcttgaacccggcatcgcgcagggcggcggtcaccgccttggccataccgccgctgccacgcagagcaaacgaggtggtcggggggatctggtatttcgccagtagtttggcgatggcgatatagtcggtgttataggctcgcaggaagccgtcgtcgttgacgatggtgttgaccgattcaatcgctgtggccgacgcatccagctcatcaaggaacggaatacagctctccttgaacggcatggaaaccgcacagccgcgaatacccaaagcgcgcacgccgccgaccgctgcctgaatatctttggtggtgaacgccttatagatgaagttcagatccagttcctgatacagatagttgtggaaacgggtgccgaaattgccaggccgaccggccagtgacatacacagctgcgtatctttgttgatttcacgactcatagcaggtccttagcgcattgaaataagtgtccccaccggctagcaagcatccggcggggataatcggttcagcttacgccaaaagacgggttattgagcacaattttttcggcattggtttaccccattttcgggtagaccccaggcccgataggcagccccagcaggtaccacaccagcagcagcagggtccagacggtgaagaataccaacggatagggcatgatcagcacgtaataggtgccgagtttggcgtctttcaggtagcgctgcagaaagccaaggaatagcggcaagaagggcgacatcggtgccagcggcagcacggatgagtcggcgatgcggaaaatcatctgagcgaaggccggatgaaaacccaacagcataaacatcggcacgaagatcggggccaggatcgaccagatggcggagccgctggcaataaacatgcacaggaaggcggacaggaacatcaggccgaggaacgccggtgcgccgctcattccggccgcctccagcagatccgtcaggccgatggccataaacttgcccatgttgctccagttgaagaacgctacaaactgcgacagcgggaacaccatgacgataaagcccgccatgttcttcatcggctcgaccagttggttggggatatcgtccgggcgtcggatgctcttggtgacgacgccgtaagtgatggcgacggtgaaaaagaacaggatgatgatcggcacaatgccttttataaagggggaagggatcaccgagccggtttgcggatcgcgcagtggggcaccctctggcactaccagtgcggccatcacggcgataaacaccagcgcggcgataccgctcatcatcagaccacggttttgtaatggagtgagcgcttcaagtttgtcatcggaggtgccttgccattttggtagccgtggctcgataaatttatccgttagcaacgcgccggtaatggtcagtacgatcaccgaggtggccataaagtaccagttatcgatcacgctgacgtggattgcgccgtcaaccgctttggccgcttcggtactgatgccggaaagcagcacatcggtggtgacaatcagcaggttggcggtaaaccccgagccgacaccggcgatcgccgccagtagcccggcaatggggttacgcccgacggccaggaagatcaacgcccccaacggcggcattaccaccagcgcggcatcggaggaaatatggctgaagaaggcgataaacagcaccatatagctggcgtagccggcgctgacgtgtgaggccattttgtacatcagcgcctgcaacaggccgaccttttccgccagaccggcaccaatcaccagcgccaggatcgcgcccaatggcgcaaatccgctgaagttgtggatgatattggggaggatccattgtattccctccacgctcagcagattttttaccaggatcatttccccggtagccgggtttttcaccaccaggcccaaccaggaaatgagcgcggtggcgagcattaacaccacgattaaataaacgaataacaggaagggattgggaattttattaccgatacgttctacccagtaaaaaatacgcccggggcttttattggcggatgatgctatctcactcatgatattaccctcttgtccgtaatcagatttttatagttttagggatcgcgatggtgatctggctcggaacgggagccagaacggccgggatttacttcaaaggcgtaggtttcacccccgcagggatggggcattggtatggctgttcggcacgttgctgacggaactcctcgcggcaagcgttcagcaaggtgttatcgctcagtaaagcgacggcggtagcggccatcactttacctgccaggcacatgcccttatgggctattgaggtgcggccctgggcgaccaactgccaggtatgcaacggcgtcccaagagcaaagcaggggctgaagcactgggccgttggcgtgacccaactgacgtcgccgacgtcggtagagccgtacaggatttcttgtgactccacgtagggggcgacctcgtccatcaacaccttatcgcccaactgccgtacccattcctgcccggcccccccgccagtacgtgaaatgttcagtttggcattacgcaggtcgtctttactgagcgtttggcggatctccgtggcaaaacgccgctcttcatcgttgtaatccggcaagccgaaatcacacacgtactgatacatcgccttttccaggcggcgattggggacgtagttggaacaggctttttcaaagtgcaccgtcatctgggtgtcggtcatcagcgctgcacctttggcaacgttgaccaggcgctggtaaatatcctgcacctgatcgagctggggagcgcgtaccaggtacaacacttcggcatcggcctgcaccacgttgggggaactgccgccggtattggtgaccgcataatgcagccgggcttcctgcacgatatgttcacgcagaaagttggctccggtgttcatcagcgtcacggcatccagcgcgctgcggccgagatgtggcgagttggccgcgtgagcggcgacgcccttgaagcggaacgcggcctgaatattggccaggctgctggtgttgaacatgccgctgaagccttccgggtgccaggtgagagcggcatccacatcggcgaacagcccttcacgcaccataaaggttttaccagagccgccttcttctcctgggcagccgtaaaagcggatcgtgccggttaactgttgctgttccatccaggctttaaccgcaaaggccccggccagtgcagcggtgccgagcaggttatgcccacagccatgaccattgccgttttccaccagcggagacggggtggcacagcctgcatgctggctcaggccggccagcgcatcgtattcacccaataaggcgatcaccggatggccgctaccgaagctggcaataaacgccgtttcgataccaccgacgccgcgttcaacctcaaaaccctcttgttccatggcgtttgccagtagctcggcggagtggatttcggcaaagcgggtttccggatgatcccagatctcatcgcttaaggcactgaaacgggcctgatggctattgatgtaatggtgaataaaagagaccagttccggctgtttcattctgcgctcccaaaagtcggtaggttcagtgccaggctggccagcgtttttaccgccacggtgaggacctgctcgtcaaaatcaaatttctcgttgtgatgaccggcgctgagttcgcaaccgaaaatcacataggttgcttgcccaccgtgagatttcacccgttccatcatgtaggtggcatcctcagagcccgctgcctgctcgcggcgatcaacgactgaactaagttcgctgatgctgagtgcctggcgatggatgtaatccacccaaggttgcgtcggctggctgctttgtgctgcgcccatcagggcgatgtcgtattccaccccgtgcatgatggcggcccctcggatgacgttgagcgcttgttggtaaacaaactcgttgatctcattggtggcgccgcgtgtctctaccttcataagggcgctgtctgcgatgacgttacggccggtgcctgcttgcaacacgccaacgtttatacgtgagctgccttcgctgtgacgagggatggcatacagcccaacgcaagcctgagccgccgccagcagcgcattgcggccatcctcgggtttggcaccagcatgggaggccacgccacggaaagtgacgtccagcttggtggtagccataaagctgtcgctgccgcacaccagttccccggccggtacgccggtgccgatatgcacggcggtaaagaaatcgacgtcatcgaccacgccggcttccaccatcgatttggccccgcgagtaccttcctcggccggttggaagatcagcttgatgcggccatgcagctgtggctccaggctcttgaatacccgcgccaaccccaggccgatggtggtatgcccatcgtgcccgcaggcgtgcatcatgccgctattgcaggaggcgaaaccttcacgaaatggcagatggtcgggatgcagcagttcgttgagatcgagcgcgtccatatcgacgcgaaaggcgatggtggggccagggctgccggtatccagcgtggcgacaatgccggtaaccccgccggaaaagaagggtagccacttcgccagggcaccttgttcgatggctcgctgttcctgcgccgccaggatttgtgcagaggggagtcccatgcgggtttcggcgttgatcacctcgtggccgagttgcaactggtaacctaatcgatccaactcttctgccaccagcgaagcggtacgaaattcaagccagccggattcggcatgatggtggaagtcacggcgccaggcttgcagttgcggatacagttcggtcaccaacgttgaaagcggagtgttcatagcagttttccattagttatcacgccttgaatgaaattcaggcagcagtggaggtcaggcaattaaattaaaattgaatatttgcgtaattagttactaaaaagccgtgaatggcgcttattgagcgcgatactgcgtgtaaataagcgaaatgatgattgggttatttattctgtttttttcgaatgtacacaatggtatcgggttaaataagatgccaatatcttgctactgataaacaacggttatcgcaaatcgcctatgccagcctcgataaaattgcaccagttacgcgcctttgtggaagtcagccgccagggcagtattcgcgccgccagccgtacctgtaacctttcccagcctgcgttgaccaagtcgattcaggagttggaggaggtgctcggcgccaagctgtttgtccgccgtagtaaaggggtggtattaaccgactgcggtgataacttttttcagcatgccagcctgatcctcgaagaactgcgggtggcgcaggaagatattcagcagcggttggggttagcgggtggctctgtcaatatcggcgtcggtggcagcgttgcccgcacggtaatgccgaaagtgatcacccagtttcaccgcgaatatcccaatgtgaaggtgcgcatcgtggaggggcaactggtctcgatgatcccggagctacgccagggggaattggattttaccattaatacctactaccccagcagcatggacaatgagttgagctttgagcggctgatggaaagagaatacaaggtggtggtacgcaaggggcacccgtgtgaaaacgcccgcacgctcaaggagctgcaacattgcgattggactatgccaacccccaatggcagctactaccgcctgctacatgaactgtttggtgatatggggatggcaccggcgatcagcgtcacctgcgaaacctttatggcctgtaccagcctggtggcgcagagtgactttgtcagcattttgtcggttgatgtgatctccgatccgatcctgggccgccatctggtagcattggaattggacgaagccttaccacaagctaccttctacctgatccaacgaaaggatacgacgctcacgccgatgggggcctacctggctcgcctgttcaggcagcactgccggtagccacctatccgtggtgccgctagtggcgaatacagacgatcagaggattggtaaaccctttgataataatggcatttttatctaatcccctgatctttgagtaaaacccgatgcccggggtttgcggtaatactcggttctgccaaaggtctgctggcgtattatccgtggggtggctctctgttcgggtaaagacgatttcgttcacgttttccagctccgatggggcgacggtaaagtagacggtccttcgcaggatatagtcattgcccttattcttgattgagccggaaaatttcaaaatcccatcataagccgacctgaaaatgacgtcgatatgagtgttgacctcaacttcgtcagcttcattgattctgaggtgcgcgaacaattgagcatcgcaatggaacggcttgcgggactgtacctgatatatataaaaaagagttgaacataagctaataaccaacagcagggctacgacgatctttttcatgtttttactctactgttttgtaatttaaacaatttttatagctggcggcatcaattttactgcaggcagcgagcagccggactctgaaacggtcgttattagggtgtgcctctgcataaaaaacatctagctcctcccgcgaacagtctatgccttctgctgctatctctttgatgatcttagcggtaaaagctttatttggcttgtcatcatttaagttatagatgctacatttttcatgagtcaccacgaagttcacgctctctttttggctatgtctcagcatagtcgtgccagttaccgtggtcagtaacagtaaaactgcaagtatgtaaattatcatcttgtgtttttttaacgataaatagatagattgatgctctccttgctcggtcattgtaggcactgggttttctgaaaaggtgctgtatttgtcagtgacaggaaccccgttgttcggcgctgcttctgttattccctgaaccgatttttgtatcggatggatttccgcatccattctaaaaccgacgcggggcacggtggaaatgatatctttactcacgccgagattagtgaaggctttgcgtaactcactaatatggttattcaggctggcattagacggcgaaaaaccatagtccgcccagacgttttttagcaggtcatcgcgagcaaggttgaccctattgttgttaatcaactcactgagtaaccgggttgctggctttgataattcaacagattgctgaatgtcatttttaaccgtcaatattctattgtcaggatcaaagataatattaaggtttattatatatttcatggcgataaccgagcatccttggtgttagtgttgaactgcgtccagtgataagaatagtcttaatggtttgactgtgcgtaggaatttagtggtaacccgctaccgtagtcaaccctgatttgaactattttttcagcaataataactagttgaattcaagacagtattacctactcgcatatcggttttttttcgctcaaaatgacattaaatatattaaagttgataatttttagtgattaactctaatttttgcgtattaatcaggttattttgcttgttcattatctgatcattaagatttatcgcaacgccaaaccaccggcaaaagcgtttaaagagtgtacgtaatggtgaagtcggtaaagtgactcctttcttcacaggcaacgttggtgctgtcgcagaccctggtaagttgggggctggtcttgtcattgaggatgctaactgtcctattaaactgactgagtcaaccactatccaaaagctgcaaaaaggcataataccttgagcttcattgcctatctgcagggtgatggtgcgtctgcaactgttaccaaaggcaaattcaaggcggttgccagcttccactttagctgaccagtaatcggctacgtcattataggcataacctattttgggcatgcggaggtatccgcatcccttgtttgagggcgacagcgtcaaggatgattttccatataaacgaaacccatattatcgccgtgttttcttgccgattcataaggaactaaaatgacaccacatattgttatcactattcaggatagcaaccgttattttgctctgggcattcaacatattttgcaggactattttctcgctaaaggctgtacatggagttttgtgccagttgcgcctgggatagcgatcgacctgatggtttgtgtcaacccctttggctggtcatcgcggttcaattcccgccgggaaagtccggtaaatcggcggcttgggacgattatcatacgtgatacggccgctgagaatataatacgtcagcatgagctcgccctattaggtcgcaaggaacggcctgatgccgtggtgcatttggttgaggagatgtttgagcaggcaagtcggtcgtctctgacagacaatatggtaagtccgtgtcggcatttgcatctgaccccgcgcgagcgcgacgttttgcaagggatctcagaggaattaacacctgacgagatcgcgagtaaactttcgctgaacgtcaagaccgtcagcacccataaactcacggcgatgcgcaagctcggcttcaagcgtaatggcgaattatattactggctgcggcaaggtggcctgtggtaggggaatagtccgcgtatgccggttggttttcgccgtattgttttttctccatgcttacgacactatctcaggcaaaattcactcgggatgagagtgagcactggagataagtaaggatatcgatgaaaaaactcatagtagccgcggtggtctcaaccatcgctggtaccagccagttcgcacaggcctcctccgatgaaaccgggtgcagttggagtgattattgcgcaatgggcggtgtgccctacctagccgccgataatgatacccgcgtcaatctgctgatgctggctgcgggactgcgtaaattacccgtggcactgtcgtcgttgccgcaggatattagccgcagcagaggatacacgtttggcgtgttccctggtgaagccgccactgaaaccgatcaggccaccgcacctgctcaaactgccgtactgcaggaaaatcctctcaatatacaggcgttaagcttaggcattaaaccgtcgggattaaccggggtttcaacagaaaacgaggggcgttgggtttctaataatccagactcattaagccaatttttccaggccctgctggcagaccagcagctagatcaggccgaacgcgacttactggcgttgcgccgggccaaaatttaccggggggaagcgcagccggagcaatttttaccgctgatggcaaactatgccgcaggttcccatgcagcggcgttcagagattacctcaccagtgcggaacagttttatcaggggcagtttgctgatgcggataccgggttccaaaggcttaaagaatcggatcagccttgggtagccgaaaccgccgcttatatgctgttccgtgtggccttgaaccagatcactgaaaatgccacggatcagtacggcatgttcgatccgcagcgggctaataaagaggcgggtgccctggcattgcaacgtgcgcaggcctatctggccgcttatcccaaaggcgaatatgtggattccgtgcagggattacagcgccgggtgaattggtatctgtccgactggccgcgtttggcacagttgtatgaaagcgagataaccgcggccaccgatatcaatacgcttggcgcgatgattgatgaaggggaccaaattctactgagccgcaacattccttatgacagtgcggagtcgccctttgtcagcagtgccgatgccccgttgttgaccttcacccaaaccatgaagtggttgcgcaaatacaatctcgataaccagtcgatgccgaaagtgaccgatgagatgctgcaggggtacaaaccgatgtttgttgccgccaatcagttgccgctctgggaatatatgcataatgcctggctgttctatcagcaaaaggattatgccgcggtcatcaaggcgatccagcctgcggcacagctggcagcgaacgatcttatcgcgttcagccaacaggtcctctacggcgatgccctggtgatgcaggaaaattggcaggctgccgaagcccattggcgtcatctgcttggcatgaagcttgccccttaccagcaacagtatctgcagctgatgttggccaccgccttggtgcaggaaaataaaacggcggctatttttgccccagacagcccaatcaataacctgcgttatcgctccgtggtgctcaaaagcctggccaataaagcgttgctgcaacagcaggccgtaggcgcacccaatgacgaagaaaagaccatcgctctgcatacgctgctgtttaaggatttgatggtgggtgactatcaggggtttattgacgacagccaactgaaaaaaaatatcaaacagacgcctgacccgcaggtgtttggcgatgttgcactcagcgttttcgattgggatggcagccggacggagcctggttatttctgtgcttctttagacgctaacgttgccgtattggcaaagaacaagactgatgcacacgccatgaactgcgtggcagagttcttgcgtaccacctttgccgatatcagcacggaagcggaaatggggggcaatgaacagttggatgatctggctggggtcgaactgagtaaagataaagcgcacggcagattaaaatattatcagcaagtgatcgccgatcccaaggccgaaccggaagataaaacctatgcgttgtaccgggcagtgatgtgtttctcaccttccggctacaacagctgcgatcggcaggagatctcacaaaaaactcgccaacgttggtttaacctgttgaagagccagtataaaggtaaccagtgggaacaaaagctcaaatactattggtgatgcgcgtattgctgctgctgtggttgccaatctctgcaaccgccgcagcggcggataacgcagctggccggtatgtaaatgcgcatgattaccgcgcattctggctttggtccggcgtttggccgcagcctgcgttgcagcaggccgatttgctctatctccatcagggtgaaatcgtgaacggccgccagggcgctcgttttctgaagctgggattgccgttgagcaagctccaggcgcctgccgtctggatcaccgtacgtgtcgcaaccctggacatatccgacgaggtattggcctcggcggtgcgtctgcctgctcgttgggctgcggcaggcaatcgagtggtagggctacagatcgactttgacgcggcaacctatcaactggataagtacgcggaatttctcgacaaactgcgcggtcgtttacccaaagaatatgctttgggggtgactggcctgctcgattgggcaaagaccggtaacgtcagccagttgaatgcattaccgatcgatgagttggtgatccaaacctatcaggggcggcgcacggtcacggagtatgaacgctatctccccgcgctacttaagctacaaatccccttcaaaatcggtctggtgcagcagggcgactggaacgccgagtggcaacggcggctggccacatcgccttattatcgcggtgaggtggtttttttgttgaatacgagcctgtagttgttgattttatataattatatcaattggataatcatattatttgcttatgctagtaggcagaacttaactggtctaaaataggtatgaatcgaacgatttatacctatttgaacgactgaggaaattgccatgattagctttacggccaaccaggccaaaacccagtttggcgagatgataactaaagctcagcgtgagccgatcagcatcaccaaaaacggtaaaccttccgtagtggttatgtctgttgaggattacaacgagtttgaggcgttgaaactgcaaagcttgcgcgccaagcttgcgcagtccattgctcaggcagaggctggccagttgcatgagggtgaacaggtatttgacgagttgatgaaggatctttaatggttaactacaaactgactggcgatgcgcgagaggatttgcgcgaattaaaggcattttctctgaggcagtttggaacgttaataacaagggaatacttggctgatatgcgtgccactatgcagcatttggctaatatgccggggatgggcactaatgaagttgagagtttaggattggatatatggagttttccgtatatgagccatacgatctattatcaacgtgccgctgatggaatttctatcatcggcgttgttcaccagagtcgcctaccaacgttgttattaaatcgtcggatatgaacataggatgaaggagctctctttggctgtttttttgcgctcctgttttgcagactatttatgtaggggcgtagcatgcagtacccatccaaaccccgttccagcctttaacccccaccactaaacactgactaaacagccgaggattttaaccatgtttagtaatgccatggcgctaggcttgatagctttcacaaaagcatcacgcaaccgcggcgcggctggtaaagtcgcttgattgagtcatatctccgctataaattgatctgcatcgtttcactaaaacgatacagataatgccaggtcgtatatttaatgtattgattattctgttaattaacggcgtgtcgtgcataagttaaccgattaacgtcagcaccggagggggagcgaaaacatggccaatattcgtgatgtcgcacatctcgccggtgtttccgtgagcagcgtttccaacgtgttaaatgggcgtagtaatcaaatgcgcccggaaacccggttgcgtatcgaacaggtgatgcgcgaattgaactatcagcccaacagagtggcgcagcagttgaaaaccgggcatgcccggatgatcggtctgctggttccctcgatcgtcaaccccagcttttctgccctggctcgcgaggttgacctggcggctaaagaacaccgctaccgggtgttgttgggcaacacctatcggcaagaagatgaagagcgcacctttatcgaagatatgttcgcccatggggtgcggggcattatcgttgcggcgagtgatatccgtaagacccattttgcacaggctgccgaaatgggaatgatgatcgtcaactacgataaccggatggtggggagtttcaccgctgatgcccggttattcgacagcgtctcaatggacaacgtagaggccgggcggttggcggctcaacacctgatcgaacgcggttgccgcaatatcgtctttgccaccgaggccagtctgaccatgagccgcagccataagattgaagggtttctcaccgtggtgcgtaatcatcgcctgcccgctcagcaacgggtgatagaaggcaaagccagcggagagtatggcgataccgagatggccgaactgggctttaccctggccgctcaggtacttgctctttctccgcgcccggatggcgtggtggctatcaacgatgctctgggtatcggcctgttggcggggctgcgggaagcgggagtggcggtgcctggtgagatatcggtggtgggtatcgacaatattccgctctcggggttggtgtggcccgcgctgacctccatcatgccaccgcttgccgagatggcccaggtgatggtggggcgcctattgcaacgcgtaggggatcctacactagtccctgaagagtttattttcccgccgacgttagtcagccgccagtcggtaataaccattacgccataacgcgcaaagagtcacgagaacgattaaatagcattatttattatcaggtgaatatacctgtatccatcaggcatgcctgtagcagattattattccgattaacaacattggaagtattctattatgcaaaaaagaacgcctcaggaaattgaacgcagtgccattagaaaaatgacgctgaatattgtcccgttaatgatcttattatactttctggcttttttagatcgtaataatatggcctatgcggcaatggcattggaggatagcctggggttaaccgccacggcttttggctttgcctctgggatattctttatcggctattttatgtttgaaattcccagtaatgcgggaaccatcaagtttggcccacgaatctggtttgccaggatccttatcacctgggggatatttgccgtattgatgggttttgtccgcacgccgatggagttgtatatctgtcggtttatgttgggtgtctgtgaggcgggatttttcccctcggtcgtctattacttcacggtatttttcccggagaagtaccgcaccaaaatcctcggcatgtttatcatcgtacagccgttgtcgaacgctatcggctcaccgatttccgggctgatccttaacgttgagcatggctggtttggcctggaaccctggcagtggctgtttatccttgaaggtattccaccggtgattattggcctgtttatcccttttattatcaagaactcaccgaaggatgtgggctatctcgatgtggaagagaaagcctggctaatggacaacaccacccgcagtaaatcgggttccaaggtcaagctgtctgattttgtgcagggcataaaaaataaaaagtatctgttatacgccatgttgaattttggcatggtgtgcgggatctacggttttgggatgtggctgccctccatcattacggctatctctggcgatgacattttccgcgtaagcctgattgcctttattccctacgggttggccgccttgctggtttatccgtggagcctatgggccagtaaaagcaaaaaaattggtgtgtttgccggcatcagcatgattgttgctgcctttggcctgataggtgccgtggtgttctttaactataacgtgtttgtcgcgctgatgttcctgagcgtggctgccataggtatctatacctcggttccttcattcctttccatgccagccaatatttctaccggggcggcggcagcggccggactggcagtggtgagctgtatcggcaatatcgggggttttgtcgctccttatgtggtcgggttattaaaggatgtcagtaacagcaatactccggggctggttttcctgtcgctgtgtttattggttaccggattgatctgcattttttactgcgccaaacagcgtgaaggcgttattcgctcataactggttttatctaaaaataatcaagaggcaataaaatgggaaatctaacgggtaagaaagtgtttattaccggggccgagcaggggattggcaaagctaccgcagagcagttgattaacgccgggtgtgacatctacatccactacttcagcggcgaagaggggccaaaggaactggctgaattagcccattcacgcggtcaacgcgccgcctatggttatgcaaatttaaccgataccgaagatacgcagcgatgcgtcgctgccgccgctgagtttctgggggggatagacatactgatcaataacgtgggtggcattatcgcccgtaaatggctcggtgagatcgaccgtcaattctggcagacggtgatagatgtcaatatgacgaccatgttgaacgtcacgcaaagcgcgctaccttacttaaaaagcgccaaggacggagccagcatcgtcaatttggcctcactggctgggcgttccggcgggcattctggttcactggtgtactccactgccaaaggggcggtattaacctggacccgctccctggcggcggaactgggtgaacatggcatcagggtcaacgccgtagcgccggggcttattcttggcactcgcttccataacctgcataccagcaaggaatctgccgatgaaaccatccacggtattccccttggccgcgcggggagcccggaggacgtcgctcgggtgattaaattcctcgcctcggaatatgacggcttcgtctctggcgccaccatcgatattaacggcggtatttcccgtatgtgagtcaccccagccgctgataaaccgcaaccgattcactacgtaggggcgctgcatgctgcgcccacctgtcttccttactggaaaataccatgatcaaagccgacattattcatccgcaactgttgggtgcactggcgctgtgcgggcataagacccagatcctcatcgccgatggtaactattcgttcgtcaccaactcgtcgaaagaggccaccattgtctatctgaatctggcccccggaatgatcgccagcagcgtgatattagcaaaggtgctcaagcatattaatgtggaacatgcctcgatgatggcttggccgcaaggtttcaccaacaccatcgctgccgaatatcagcaactgctgcctgacggttgccccatcgattatctcaaccgcgaggccttctatcatgcggcaaaatcaccggagacattattggttatcgccagcggtgagatgcggcgctttgccaacctgctgctgaccgtggcgccggtgtcgttggctgattgaatgcgggttatctttgcgggaggggcctctgttggctactgacagaaactgtcaacagtgcaggctacacttggtttttgcgggtaggaaaatcctgaaaattgcccctatttctgacaaggacactccgatgatacgtgttattaccctcctgactgaaaacttttccgattgggaaaccgctttgatcaactcgacggggcgtgggtactacggttttgactgccgttttgccacccctggcgcagcccaggtcacctcttcaggtggcatgctggtttccccccatctggcaatagaagccattcagcctgatgaagtcgatctgctgattgtctgcgggggcactatctggcaaaccgcacaggcgccggatattaccgccttggttgctgcggcttatcaaagtaaggccatcgtcgcggggatttgcgatggtactcgcgttttagcgcaggcgggtgtgcttgatgcggtccgccatacttccaattcggcagaaaacctgttgagcctgaactatggcggtgcgcaatactatcaggatgtgccttatgccatcgccgatcggcgcgttatcacggcaccgggtaccgcaccggtcagctttatggccgcaatcttgcgtactctgggtctgggggatgaaaacctcaatgcctaccttgcgatgcatgctgctgagcaccgcaagccaggctagtccactgttataaatagccgccgagagccacttcacgtggagacaggctctctctggccgagggtgtctggctgtttgtgcgcagataaggcagcataagggcggtcttttctctgccgtcccaccagttgtgccgaagagatgaggttggtttctaccggcaacgttgatggcagcggcaagcgcggtagagtgattgacgaccgttcgttcagatagcgtcctcccccctgcagtagccactgatacagttcctgattgcatctgaaattgagcttgcgcatggcgttctgcttatgggcattggcagttttattgctgatttgcaaatagttgccggtatcctgcccattcattcccatgtgtatgcaccgcaaaacctcctcttcccgcgacgtcaacggagacatacatgtgcaatcgtagctggacgctgctggtgacccaaaaggcggaaacagcacgctatccaaccgctcatataatgaggatattgtctggtgccggtacagcgccctggtatggcattgttcgcaatgcacccttggcttgagctggtttttgttgcgcccctgctcggtgataaagaataccatcggatgatttttccgctgatgtaagcggtaatgccatgggtagctagtgaccagatcgcccaggaaaatgatgtcgatatcgctgccaacctgtgtttcctcaagtagacggatgtccagccgacgggcctgaaaataggtttgcagccccaagcccagaccatgggtaaaataacggtcagcatcgattatcatgatggacagaggttgtttcatggcatgagttcctttcaaccggcgtgtctgccttgcgtgaaacaccgtggcagacacgggatagataaatgtcagtagaaaaaaatcaaacacaagtcagaagggggaggcgtatttagccttccgccgcaacgggctgcgcttcccttttttcatgatgtttaggtgatggcgagggttcagcaatataccagcgtaaactgttattgacagcgccagaggtaacataagcttttttgttttcaactaatcgcagcagatagtaacgagcaaggtatattgtcgtctcggagtattctgcgatttcccgtgttttgggccattgaacctgcgggggaacgcctgtgtgatgaatgtcgcgcttgcaaagggtttgtagggcaataaaaacattatttaactgcttttccctttctttattggtgcgataagacatgtcactacctccttttaatgcgtcttgatgggtgctattcgaaatggaataatcctatgctgcttgcttttgttgctaacttttctaggtgatcacaggggaatactgtcagaatcataacccccatttcttccttatgaggcgtcagtttaccattctaagctatcatggactattgtttcgtgaaaaccaaatttacgatcaatgagttcgcaaataccgcgttttgcagcataaaatactaagtaattcgtttttgcgaccgtagtcgtcgcaataagaatattcttgcatataaataaggtttttatggcgaaattgctctgtttggaaaacaacactttcaaaatttagaggtatttgcaataattttttggcgacaggagatgaggttgtccgatggagtggcgtgagaattttcctatcataaataccctgatcaatgattaaattgatgtgtggctgttttatggtcggaattctatctattcaagggtgtcgcataaagttgtattttaataattcgctttattcatcggatgaagcaccggaagaggcttgtcttttctggtgaactgcccccttcgcaaataaaggggaaggaaagggatgccttcttttataccaaatgaaaggatgctgccgggtatatcaattaccgccaaataaaacagcgttgttctgataggcaccgttttaattgtgtcgggttaggtatgtctggatttctcgttaaattaacgttttaaggataaagaaaacatgaaactgactaacattgcgctggctacggttctgtctctgggtatggtctctctggcaaatgctgatgcgggttcgggcaaggtaaaattcgaaggtaaaatcattgatgcaccttgctctatcgctccagaaagtattgaccagaccaagagctttggccaagtggctaatgtggagctggtgaatggtggtaaatctactaacgtggtgaactttgatatcaaactgcaaggttgcgatatctctagcaagaacaaagtgcaggtcaccttcgctggtccatatggcggcgcaactggcaccaccaacaccctgctggccatcactggcgcggcaaaaggtgcaagcatcgcgatgtttgatggttctaaccaaccgatcaccctgggtactgcgactaccgtgcagaacctgattgcgggtaacaacactctgagcttcaccgccttcctacaggggcatgccggtactacgttgaccgatatcgtagaaggtgacttcacctctaccaccaactttaccatggcatacaactaatagtggatgttactgcatgcggtttccgcatgcagtttttgctgtccttgttcattaagggagccagggatgtcggtgaatagttttacggctacctcgttgtttttactggtgggagctgtcacggcgctgccggtttggggggagggaagccaactcagcatgaacggggcgatagtggcttccgcctgcgatattgaccccaccagccgagatcagaccgttgatatgggcacgctgcccttcgataggattgttaatgacagtcaggcattgtcacggccattcagtatcaggctggtgaactgcacgcttaagcatagcaacgataacattttgggcaagcagcactttcgcgtcacgtttgacggccgcaatgaagatgggtacttcggtgttgagggtgaggcgcgcggcgtagcactggtgctgaacgatgcgctggggaatcaggcggttccaggtaaggaaatgccggcacagacgccggtattacagggtaaagatatattgctgcactacaccgcacgcatggtagccaacaatcagccgttacataccggcacctatagtgcacaagtgcgataccagttggattatcactgaacagcaggctgacatgataatggacggtcagcacgccaagacagattgacttccccggcaggatatttcctttaataacaaccataacgcccgggaaagttttaacgcataaaggtcaatggatgatgagcaccccacttgtaggagtacaggttccgcgcacccgcttgttgccgctgttgattgcgctggcactggtgaatggccaggtttctgccgctaaacccatcgaattcaataccgacgtgctcgatgttcaggagcgcggcaatatcgatttggggcgtttttcccgcagtggttacgtgatgccgggtgaatacagcctgctgatcaacgtcaaccagcaggaactgccggaacagacgatcccattttatcccacagacaaagatccgagcgttaccgaagcctgtttgtcccccaccttagtggaacaaatggggctgaaagaggaatttacccgcgatctggcctggtggcacaacgggcaatgcctggtgatcggtagcctcaagggaatgacggcgcgccccgagttgggcagcaacacgctctatctcagcattccacaggcttacctggaatacagttctcccgattgggatccacctgcacgctgggataacggtattcctgggttgctgctggattacaacctcaacgctcagagccaacgtcaggatcaaaacgatggtgtcgagaaaggctataacctgagcggcaacggagtggtgggcgctaatgcagggagctggcggctgcgtgccagttggcagacacagattgaccatcaaaccggctcagggcagtccacccagcgcaactttgagtggacacagtataccgcttaccgggcgatcgcgcggctgcgggccaaattgacggtgggtgaagacttcctcaactccgacattttcgacagcttccgttacaccgggctaagcctggtgagcgacgacgcgatgctgccgccgaacctgcgcggctatgcgccagaggtgagtggcgtggcacgtactaacgcccgtgtggtggtcagccagcaggggcgggtgttgtatgaatccctggtgccagccggcccgttccgtattcaggatttgagcaatgcggtttcggggctgatggacgtgcggatcgaagagcaggacggcagcgtgcagacgttcactatcagcacggcgagcattccttatctgaccagaccaggaatggtgcgctacaagctggcaagcgggcggccaacagactggcggcaccgtactcaaggcccgctatttggtagcggtgaattctcgtggggggtcagcaacggctggtcgctgtttggcggtggcgtggtggccggtgacgagtacaacgcgttggcggtggggattggccgcgacctgatggcgtttggcgcactgtcgtttgacgtgacccaatcgcgggccaatttgcctcaaggggataccctgagcggggggtcctatcgcctgcgttattcgaagaactttgaccagattggtggccaggtgacctttgccggctatcgcttctcggaacgcagctttatgaccatgggggaattcctggaggtacgtaaccttggtacccgtagccagagcagcaaagagatgtacacggtgtcctacagccagcagttccgcgatatagggctaacggccaacctgaactatgaccaccagacctactgggatcgggacgccaacgatcgctacagcctgtcgctcatgcgctacatggatattggccgcttcaagaaccttagcctgtcgatgaccggctaccgcaatcagtacaacgggcagaatgacgatggggtgttcctgtcactgtcgctgccgtggggtaacagcggttcgatgagctacagcggcacactggatcgcaatgacaacacccaccgggtcagctactccgatcgggtcggggatcgtggcagctatcaggtgagcaccggctttactcgcaaaggggcattggccagtggtttctatagccatgaggcggattgggcgcagattaacgctaccgccagtgctcaatcagggagctacagcacggtagggctggcattgcagggtggggtaacggcgactgcggaaggtgctgcgatgcaccgggtcgctattccgggcggtacccgtttgctggtcgacaccgatggcgtagccgatatccctattcgcaactacggtgccccagtgcgcaccaaccgcttcggcaaagccgtggtggccgacatgaacagctattaccgcaaccgggtgaatatcgatctggacaagctgccggataacgccgaagcgatgaaatcggtggtgcaggccacgctgacggaaggagcgataggctaccgccggtttgacgtgatagcgggtgagaaggccatggcggtgatccgtctggcagacggcactatgccgccgtttggggcgacggtgcagaacctgaaaaaacgcgatgtggggatcgtcagcgacgccggcagcgtgtacctgagcggtattgaacgtggtgaaacgatgacggttcactgggacgagcaggcgcagtgtgaactgacattaccagcggtattaccagcgaacggcatggctgaactcttgctgccttgccgggcgataaccgcgaaaaaagacaccacagacctggcggcaatacagaaaaaggctgagacaatacaatgagatacgaaatgacgaaaaccaatacgggaatggcgctggtcgccgtaaccttactgtgcgcgttgaccacgcaggcccaggcggcgatcgcgctagatcgtacccggatcatctttcctggcggcgataagtcggtcagcctaagcgtcaacaatgacaacccgcaattgccctatctggcgcagggctggatagaggataccaagggcaacaaggtaaccagtccgttaacggtactgccgccggtacagcgcatcgaaccaggtgccaagagccaggtaaaggtacaggcgttaccggtgttgagccaactgccacaggatcgggaaacgttgttctacttcaacctacgtgaaatcccgccgaagagtgacaaggctaacaccttgcaactggcgttgcagacgcgcatcaaactgttctatcggccaaaagcgctggtgaaaacgaccaccgagatggcgacgccgtggcaggaccagctgacgttgaccaagcagggcgacaagtatgtggtgaacaacccgacgccgtactacgtgacactggtggatgcgggcagcagaaagggggtcagcgcaacgggttttgagccgctgatgctggagccgaaaagcagtgctcctttaggtatcagcgcgtcggtattaggaggatcgccagtgctgacctacgtcaacgattatggcggccgcccagtgctgacgttccgttgcggcgcatcggactgccaggtggaaccggcgaagaagagttaattgaaaccggtcgtgccaggttacagggagagggcgcggggtcaggtctgcaaggagagaacgtatgcaacaatattatcctgttcctggtaagcatcgccgggggagcatgagatcgagggtctcaggctattgccttgccggggcgctattcagtgtcgtgctgaccagcgttccggtcagcgcgatgccggtgaatatcaggggaaccgttatactgccaccgccctgtacgattaataataatcaaaccattcgggtggactttggcgatgaggtgatgacgacccggattgatggcgtcaactataagcagaccattgtctatagcctgaattgtgacatccagaaatccaacgatctgaaaatgagcattcagggcggcactgcgggctttgggaccggatttttgagcaccaataaaagcgatttgggtatcgctttgtactatgggacgcaacggttaaatatcaatacctggtttaactacacctatcccaatcagccggtactgtatgcggtgccggtcaagcgtagcggggccaccttgacggggggcgagtttaccgcctccgccacgttattaattgattaccagtaagggagcataagacatgcgaattctactgttatccctactggctgcgggtttaagtggccttgtatctactgcatttgccgcagggggagatatgaaatttcgaggaacgctgctcgagccgcccccttgtagcattaacagcggcaataatatcatcgttgattttggccttaaggtgggtgtcaaaaaagtggatggcgttaactatatgcagaacattaattatgatctggtttgtgagccaaatacccatggttgggcgttgaaattgaagcttacggggaaccccatttcttttgataacgccgcggtgcaaaccaatattaatgggctggggattaaaatcctgcgtgacggtcaaccctttgttcttggcagtgaaataaccattacgccgtccagtagaccccagcttaaagccgtgccggtacagcaggtcggcatagttctaacggaaggcgcgtttgaagcaacggcaacgctgcaggctgattatcaataacagggaggaactatcatgcgattttcggcactgttaatatccctgtctgtagggcttggcggtttatccagcgtatcccaggcggttgataatgtgcgctttagaggcgctctggtggctgacccttgcacattgcgagtcacggatgaaaatatcaatatcgattttggctcgatcgttgagaaatatctttatatcaacacccgtacgctaggggtgccattggtattacatcttgatgattgcgatcttagcctggggaatatggtcaagctgaccttttccggcacggaaaatagcaggctgaacggtctgctggcgatatccggggcgagccagaccagcggtattggcatcggtattgaaacgcaacagggaaataaggttgcgatcaataccggtagctataaccaagggctgatctcgggcaacaataccatcagcctgcgaacctatgtgcagggtgagcccgatgcgattagccaaaaaaccattaaccctggcgactttaccgccagcgcgacgtttttattggaatacgagtagcccgtaatacggcttaccctgaaatcgacggtgtgactaatgagtccgcggtagataagggatgatcacaggggtatttatgcaagccattagagtgatgcttttagccgtcatgttgctgacggcctatagcgccaatagcgcgatttattcttatattacccgcagtgagggcacgcccgagaacgccagatattggtggactattgagtactgggacaccgtagatgctactccaaatccgtgttacaggtgggggcaatgtacggtatttattggccatcggcacagtgatgctggagaggcgggccctggtgtttcagatggtaacgaataccttgatggcatccagaatttgccgacggtcggcgacataggtagggcatttcagcaaaagtattcgctaccgcgcagcggaactcaaacccacgttggcccggcagtgacgcaggaatgtgtagggatgtattataaagcgacaacggggaccgcaggttccggtggtagtgccatgatgcccagcagcctatgcgggatcgtaccgccgccggtaggtaaatgtgaatttactgaaaccagcattgaactgacccatggccaagtccaactgaaagatatcgaggggaatcaggcgcggcagacgggttatatccgctgcacacaaacaatggacgttatggtctacgctgcgggtgcgggcggaaatggtatggttaatctcagaagcgatggtagcctgaaaagccgcttgaccattggcggggtgagcggctctaccgggctcaggatacgtgctttggcggcaaccaagatgccggtagagtttgtttccacgctgactaaagtagggaccgtggaggcaggtgatttcttcggttcagccaccgctatactgactatgccttagttgttgataacgtgcgcagcatacggttgaggttgttcaaaccgtatgctgcgcacgtttgatctattcgtcaggtttttcgcaccgtaaactccagcgccacaccaatgagcgtcatgttttttaccgactgagcttctgtgaccgggatgaggcttccctgaaacttaaccttcttcagcggtccgttgatcaccagtttggcccgcaggttggggagggactgggggcaaatagggtaaataactcgccccttgatggcgactgggatcttcctcaggtcaatgcgttgcaaaacgccgatcgaggcatacagcaccgcaagcggcgttatggagactagttgcagcggtgtcacactaataaaatccagcaataactctggcttaagataatgcagaccatcatgagctacggtgacgccagtgatttctggcattgcgagagtcttaggcgaagaggataagtctgtcattgggtcagcctttgtctggagttgccgcaggagtgttagtttgctcccactgaacatcccctctacaaaacctcctttttcgtctctcaagcaagagcgggtgccagataatttgaaaaacgggatttagctcactcttattcacccactaaaggggggttctcctaacctcaagtgcttggttggggtccgcatcatgttggcgtcaacggtgccaatagctggcgctattaataatctgtctgaataactcaattttccagctacgtgacaattgctcatattgtcttaaatgtagataagatatttcttgtcttgttgggtaataacttaattgctcaggatgtacaccaataaataatctgtatgaataactcggttttccagttgcacgacagagagtcatactctcttaaatatagctaagacaattcttgtttcttgttaagtgataacttagttgttcggaattagtgccaataaatgcagggattcttagctgttaacgggaaaattctatttgaactatcagagaaattaatcaataatggttgttattcaaaattccaatcagttctattataactcatgtcaatttaaacgtattggcccattacaagtccggcacacgatgggggggatcagcggctttgctatccggcttgcgccagtgtgccgtgataaaagccattcccgaaggatgggtaaatggttttatttatagcttaagcattatgaaatagatggaagttataaggaatatcaataatagtctcgctgcacatattggccttggtggggaatattatggattcacgtgatggtttaattcgatggcggctttgtggctagaaattggcaggaatagacgaaatagctagggaaaaatatccatatgttaaaaggacgaacaaaacgtaggctgctagggggaggcgctttagcggcgattgctatgctggtctattggcatttcagccaaccgttacctgcggagtttaaaacggttaaggttacccagcgtgattttcaacagaacgttttggcgaccggccaactggatgcggtacgtaaggttgatgtgggggctcannnnnnnnnnnnnnnnnnnnnnnnnnnnnnnnnnnnnnnnnnnnnnnnnnnnnnnnnnnnnnacaggcacaaaacagcattcgcgaaggcgaggccacgctacggcaactgcaagcccagctgcaacaggcgcaggcggagcagcaactggcagaggtcactttgcagcgtaaccgcgaattggccaaggtgcaggcggtatcgnnnnnnnnnnnnnnnnnnnnnnnnnnnnnnnnnnnnnnnnnnnnnnnnnnnnnnggcaaacacccgggcgcagatcgccaaaaatcaagccagcctggataccgccaagatcaatctggcctatacccgcattgaagcgccgatggacggtgatgtggtgcagatcaccacctttcagggccaaacggtgatcgccgcacagcaggcccccaacatcctgacgttggcagacatgagtac

SEQ ID NO: 213 - DNA, 347 bp, unknown
  Altogen  635822 strain
  misc_feature (171)..(301): n is a, c, g, or t
gtgtaggttttgccgttcagggtgatggtgacggtctgtcccgcctccacgtgggtggtggtgccagacagggtctgggcggttttcacttcggctccgtcgataatgtcattaccggcgaagatgccaatgctaacggttggcagattggccgggttggcatcgacgctnnnnnnnnnnnnnnnnnnnnnnnnnnnnnnnnnnnnnnnnnnnnnnnnnnnnnnnnnnnnnnnnnnnnnnnnnnnnnnnnnnnnnnnnnnnnnnnnnnnnnnnnnnnnnnnnnnnnnnnnnnnnnnnnnnnaggtcagggtcacggtgcggcccgcatcggcaacggacgcggtgcc

SEQ ID NO: 214 - DNA, 279 bp, unknown
  Altogen  635822 strain
  misc_feature (102)..(216): n is a, c, g, or t
cgtgcgcaagtgcaggtgatggaggcggccaagcgttcagctgccgagttgcagctcaagtacaatggtctacgccagtcggtacatcgccagcgccaggannnnnnnnnnnnnnnnnnnnnnnnnnnnnnnnnnnnnnnnnnnnnnnnnnnnnnnnnnnnnnnnnnnnnnnnnnnnnnnnnnnnnnnnnnnnnnnnnnnnnnnnnnnnnnnnnnngcggctcagtagcgtacagcaacgctatcaggccggtaagcaactggcgggcaatgtggcggg

SEQ ID NO: 215 - DNA, 1108 bp, unknown
  Altogen  635822 strain
gatggctgcttctaagccaacatcctggctgtctatgccttcccacatcgtttcccacttaaccatgactttgggaccttagccggcggtctgggttgtttccctcttcacgacggacgttagcacccgccgtgtgtctcccctgataacattcttcggtattcggagtttgcatcggtttggtaagccgggatggccccctagccgaaacagtgctctacccccgaagatgagttcacgaggcgctacctaaatagctttcggggagaaccagctatctcccggtttgattggcctttcacccccagccacaagtcatccgctaatttttcaacattagtcggttcggtcctccagttagtgttacccaaccttcaacctgcccatggctagatcaccgggtttcgggtctataccttgcaactattcgcccagttaagactcggtttccctacggctcccctatacggttaaccttgctacaaaatataagtcgctgacccattatacaaaaggtacgcagtcacaccacgaaggtgctccccctgcttgtacgtacacggtttcaggttctatttcactcccctcgccggggttcttttcgcctttccctcacggtactggttcactatcggtcagtcaggagtatttagccttggaggatggtccccccatattcagacaggatgtcacgtgtcccgccctactcatcgaactcacagttaatgcattttagtgtacggggctatcaccctttgctgcgcgactttccagacgcttccactaacacaagaactgattcaggttctgggctgtcccccgttcgctcgccgctactaggggaatctcggttgatttcttttcctcggggtacttagatgtttcagttcccccggttcgcctcgtatggctatgtattcaccatacgatagtgtgtcgaaacacactgggtttccccattcgggtattgccggttataacggttcatatcaccttaccgacacttttcgcagattagcacgcccttcatcgcctctgactgcctaggcatccaccgtgtacgcttagtcacttaacctcacaacccgaaggtgtttctgtaaacaga

SEQ ID NO: 216 - DNA, 72363 bp, unknown
  Altogen  635822 strain
  misc_feature (3855)..(3863): n is a, c, g, or t
  misc_feature (18096)..(18096): n is a, c, g, or t
  misc_feature (18126)..(18203): n is a, c, g, or t
  misc_feature (27702)..(27712): n is a, c, g, or t
  misc_feature (54024)..(54024): n is a, c, g, or t
  misc_feature (56336)..(56437): n is a, c, g, or t
actttaaacacagctgctctcccacaggcagagggggctggtagagcttgccctttgggagcaaaggatcatctcggcacactcgtattaagcctctgcatgcgcggcactggcgcacgatcgccctttatgcccctccttcgcagccctatcgtctagacttaacgttctgaataaggcgtctgtcaggcgtcaacatgagcgacgaaaggagcacttcatgccataccagacagtaaacccctttaacaatcagctaattaaagaatataccccgcataatgacgatcaggtggaactggcgctagcccaggccgatgcgctttatcattccgactgggccaaaggcgaaatcatccagcgcctacccgtgttgcataagctggccgagctgatggagagcagggtggaggaactggcgaacattgccagcgtcgagatgggtaagctgatcgagcaaagccgtggcgaagtaaaactgtgtgcccagattgcccgttactacgccaacaatgcgcaaaaattcctggccccggtgagctatgagtccagcctgggtgaggcctgggtcgagcatcatcccatcggggtgttgatggcggtcgagccttggaacttccctttttaccaactgatgcgcgtgctcgcccctaacctggcagccgggaatccggtagtggtcaagcatgccagcatcgtgccgcactgtgccgaagcgttcgagaagctggtgcatgaggccggagcgcccaaagggacctataccaacctgtatatttcccaggatcaggtggccagcatcatcgccgatgatcgggtgcaaggcgtggcgttgaccggttcggaaaaagcgggcagcatcgtggcggctcaggcggccaagaagctgaaaaaggccacgctggaactgggaggtaacgacgtttttgtcgtgctcgacgattgcgatctcgagagggctgccaaagtgggcgcacaggcgcggctcaacaatgccgggcaggtctgtaccgccgccaagcgttttatcgtgcaggagaaagtagcgaaagccttcctgcaacagctcaccgagcatttcaagaatgtgaaaatgggcgatccgctggatgaaaccaccaccttagggccgctatcctccaagtctgccttggaagggctgaccgagcaggtcaatgaggcggtgaagcaaggggccaaactgcacctgggcggcaaggcgttacagcacgaaggtaacttctttgaacccaccatcctcacgcatatcagccgcgataacccggcttatttcaccgagttttttggcccggtggcgcagatctatgtagtgagcgatgacgaagagatcgtcaaactggccaacgactcccactacgggcttggtggggccattttcagcaccgatattgaacgagccaaaaagctggcctcacgcattgaaaccggcatggtatatatcaactccttgaccgataccgcacctgagctgccgtttggcggtattaaacgttccggctttggccgcgagctgtcagacctggggattaaagagtttgtgaaccagaaactggtggtggttagccatagctaaggttttatactggaggggcgctaagtgggcgcagcatgctgtgcccactataaaatcaatcggttagtttagccaaccctgcgacggccatttcaagataggcgcgcggacaaccgagattgatgcggataaaaccctccccctgctcgccaaatccatagcccatcgaaggcgcaatcttggcctgttgacgcatggccagctgcaaagcttcatcatccacccccagcgcacggcaatccagccaggccagataagtgccttgtgctgatatcatccggcaccagggagccgcctgctccaacgcctgtgcaaaccagcgccggttctcggccaaataagccaacaaagcatctagccacgggccaccctgctggtaagccgccgtcgctgccgtcatggcaagcgcgttgaaaacgtctagcccgtgcgcattgagccgttcgacaaattgctcacgcagcgccgcattcgggatcaggaaattggagatgcgtagcgaggacagaccaaaggttttactggcagaggttgccacaatcaccctatcgtgccactgcgaccccaggtgtaaaaccgaggtaaagcgctcttccggcaggatcaaatccgcccagatctcatcagagatcaccgtcaccccgtgttgctggcacagcgtcagcaattgcgtcagttcctgctggttccagcagcggccggttgggttatgcggattgcacaacaccagcaacggcggcttctcccgctgcaacagctcggccaactgggtaaagtcaaagtgatactccccttcccgctcctgcagtgggttctcgagtacccgacgaccattgagggtgatcaccttcttaaaggagccgtaataaggcccctgcaccacgacgccatcaccgggttggctgagcatctggatcagcagcgcaatccccggcacaaccccttcgatcgaggtaaaccattgccgttgcagcggcaattggtggcgttgggcaaaccactcaatagccgcccggtagtaatcttcatcacgttcgctatagccaaatacgccatgatcgacacgcgcatgcaaagcctgctgcactgctggcgggcaaggaaagtcaaagtctgatacccacatcggcaacaggtcagtttcattcaattgcagataatgccccatgaaatcccattttaccgagctggtatggtggcgatcgaccacctggttgaaatcaggctgtttcatttggcgtctcctgttgttgagcctctggcttcactctggcgatgccaaaaccggtaaaaccgtaaatcaaagcgaagaagaccgccgcgtaacactgcaccgcccaaggcagcagatccagcgtgctcactcccaacgtggtcgccatataaacaccggccgccgtccagggaatgaggggctcaatcaccgtaccggcatcttcgatggtgcgtgacaggttggtgttgtccaatcccatgcgacgataggcgtccttatacagctctgccggaatgagcagcgccagcttgccatcgctggtcgctccggtgaccaggatggtagtccctaccgtggcggcaatcagttggccggtggtacgtaccactttcagcaaccggttgataatcaccgtcagtgcgccggtcaacgtcagcgcaccggcaaatgagaaggcacacagaaccagcaggatggtgctcatcattgagaacatgcccccccggttaagcaagcgcggaacatcggcgatcacgccgctgatatcatgcccgcgttcagtaaacatcgacaggttgaagccgtccatcagcgcgttcaggccctgtttcaggctaaagccctgcatcaccacggcgaggccgatcgctagcacacaggcagccagcatgaccgggatcaccggccgtttggtcaccgcgccccacagcaccagcaccggcggcaggatcagcagcaggttgaaatgatacaggctttccagcccaacaatgatgtcagtgacccgctgtggcgtagcaaccgttcccaccacgctgctatgaccggcgatcaggtaaacggtggctgccagcacaaagctgggcagcgtggtatacatcaggtgtttgatatgcgcatagagatcggtttcggccacgatagcggcaaagttggtcgaatccgacagcggagagattttatcgccgaaataggcaccggaaaccaccgcgcccgccgccgccgccaacggcacatccagccccgccgctacgcccatcagcgnnnnnnnnnccccccgccgctacgcccatcagcgcaacaccaactgtacccgcagatccccatgaggtgccggtacagacggaaatcacgctggtgaggaagaaggccgcgatcagaatatattgcgggctgatcactttcagcccccagtacaccatgtaaggaatggtgccgctgatcatccaggtaccaatcaggccgccgacacagatcaggatcatgatcaccggcatggccttcgccagcttgctgacgatcgagttgatgatgtcatcccagctgtagccctgccacagtgccaatccggcagcaacggccgccgaaagcagtaacagcggttcaatacgtaattcccacaccccatagccgacgatcaacagcgtcagcatggcaacgatcggcagcaaagccagccaaaggttgagcgttttcttaccatccataggtcaccccgagttgttattgatgtgccgctagcgtagtgaatcctggtttaccggggtgtgagctagcgcctcaagccatgtaaccgctttcatgacggataactttgtgatgcagctctcagaacaacctctggacaagctatccctgccagcgagtgaccgagtcacgcagaaccagttcagcgctaaacatgttattttgcggcggcaacccttgctgttgctggctcaacagcgccagcttggccgcccgtttggccatacgctcgatgggataatgcatggtgcttaacgcgggatacagatagcgcgccagcaccacatcatcaaagccgataatcgacagttgctgcggcaaggggatttgacgctggtgcagggctcgcatcatgccggcggccatcacgtcattaaacgtcactgcggccgtaaagcgatgacggctggaaagtatctgctctgcggccaattctcccccctctttatcaaaaggcacgctgatcacccactcccccggaacgtcgatccccgcctgtgccatcgcattgcggtagccctgtaaacgcagcttgcgatcgtcaatgggtaaatcggcggtcacacaggcaatgcgccgatgcccctgttgcagcaaatgttcggtcgaggcctgagccgcactgacgttatccaaccacacgcagcggttggcaatggcaggaaagtagcgattgatgatcaccaaaccaggggagtgagcggcatagcgcagcacatcggcatcgctcatacgggtgatgtgagcgacaatcgcctcacagccctgattgatcagaaaatccaacccggccttttcgcgctccgcctggtgcccaccgctgcacaccatcagcttcgctccttctttgcgggtcacctcttccaccccacgcgccaggcgcgagaaaaagggatcggccagattcccggtcagcaaccccagcatgttgccactacgtttggctaacgccagcgccgccgcattgcggtggtaattgaactcgcgcatcgctttttcgacacgctcgcgggtcaccggctcgacataggcggtattgttaatcacccgagagaccgtcgcagcggaaaccccggctcgctgcgccacctctttcattgtcgccatcaattattccagtcggtatcatttaatgagttgataataagcaggggggagtaacaaatccagagggtcgagttcagcttatttaaacaaaagccccccataccacagggtatgaggggcaacgatcacgctaacttcagaataaccagaaaccatacccccacagcaagacagtcagtccaagtagcaattcaagtaacagaatgccgatcgccaaggttgagctggagaagataaacccctctttgcgatcgatattcaggaagtgtggaatgccgagatacagcagatagcccgaatacgccaggccgataatgccgacaaacagacacagccagaccaacgggtacagcgccactaatccgctgagaaacatcggggtcgcaacatagcccgcaaagaccatacacagatgcaggcttggccgtgattcataacgccgcgccatccagtggatcaccttgcccatgatcgccacgccagccagcatcaacagataaaacgcgacggcggtgtagaaagcggtgaacatatccaggcggattgcctgcccttgaccagagagccagcctagccgcgtggtaccgataaacgcgctgaccaccggtatcaatgccattagcagcacgtggtgggtatacaagtgcgagacggattcattctcgcttttgatctgtttgaattcggcgttgggatgcgccagcagaccccagacatgattgaccatgagacacctcctcatttcgccgccaaccgcgatcggcgaacggaaaacacaccactggcggttcagacaccgcgcaagggttgcggctatcaggctctcggccctgcatcaattatagtctttggttgaaaaaacgtacgctgtcagcggcctgtgggttactctgcactataatcaatatgttgcgctacttgatggagggagaccatgacaaccaagatccgcacccgccaaagcgggattaataacgtgcaggccggacagaacgtgatggtgatcgaacccagcaacctgtatggctgccagttgggggacgatgtgtttgtcggcccgtttgtcgagatccagaagaacgtctgcgtgggcgcgcgcagcaagatccagtcgcatagctttatctgtgaatacgtgaccttgggcgaagattgctttattggccacggcgtgatgtttgccaacgatctgttcaaagggggcgcccctaacgccgacccggcaagctggggacacacgcggctcggcaaccgggtttctgtaggttctggtgctaccatactggccgtggaaatctgcgatgacgtggtgattggtgccggtgcggtagtcagcaagagcattacccgcaaaggcatttatgcgggcaaccccgccaggctgctaagggagctggaataattgcatcaggcgatcggcatcgaaattatcagcgaactccccttcggttacctggaatacggtgacttttcctttgccgtcgcctgttacgcacaaccctgttttgataagccggtcgagcagtggccaacacagccagtggttcctttcaataaagtctacccgctggcccccttcctcaatgacgatggggaaaccttcctcgctcgttaccaaggggaagctgtggggcatatcactctcagcaaaaactggaacgactatacgctgatcgaggagattgccgttagccgccacgctcgccgccaaggcatagccacagcgctattggatgccgcacgtcattgggcacgggaacagaacaccgccgggctgatgctggaaactcagaacaataatctgactgcctgccgctgctatcagcgctatggctttgtgctgggtggcatcgatcatttactctatcgtgggcaaccggacattgccgatcatgagatcgcactgttctggtatctgccgttcaataatgaagtgggctattgatttaccgcttttgggtgacactgggtttaccttgcgcacgccatactggccaaaccaataatcgcttgggagagagggatgcgtggcttggccctgataatattgagtacgacgctgatgggttgcagcggtaaacaaccggccaaaatcccggtagaatccctaccgcaacaggtgaaacctctgacaatggcgacagtaatggacgattacacagtaaacaaactgcaggcagcgctggctctgcatgcggcggtaccggaaatcgataaagggcgggccatcgatctgctctcgcagactttcctggaaaccccttacctagccaaccggctaatcggttccgccaccgcagcggaacaattagtgatcgatttccgtggggtagattgctttacctatctggattacgtgcaggcgctcagaaccgccaccagcgaaaacgacttcgtcgaaaatgtgattcagacgcgctatatcaatggtgatgtcagtttccagcagcgcaagcatttcttcaccgactgggcgcacacccgccagatccttgccgatgacgtcaccgcgcagctcagcccgcatgccatcaccgtggtcaaacagctcaaccgcaaagcggatggcgagctctatctgcctggcatcgcggtcaccgagcgcaacatcacctatatccctagcgaatttattgatgagcaggtgattagccaattacagaccggcgactatatcggtatctataccaagctggcagggctggacgttacccataccggcttctttatcatgacccagaatgggccggtgctgcgccatgcttcctcacgccaggaaaaccacaaagtgatggactcggcgtttgccaactatgtactgaatacgccgggtatcgtggtgttacggccgcgctgatcgccgtgttatgagctataagaaattgtgcttaaccaggatttgacttggctacggccataggtttagctgttggcacaacactgaccgatcttattgtttttacagggagtcactcatggcaattgtttggcgctgcaccgccttggccgcagcattagcagcaacgttgttattacaagggtgcgatcagaaggccgatcaaaaccatatcaaggttggcgtcattaacggtgccgagcaggacgtggcggaggtcgccaaacgggtggccaaagagaaatatggcctggacgttgagctgattggttttagcggttcgttgctacccaatgatgccaccgacaaaggcgaactggatgccaacgtattccagcaccgccccttcctggaacagcaaaataaagatcacggctacaaactggtggtggtaggcaatacctttgtgttcccaatggctggctattcgaaaaagatcaaatcgctgtcagagttgcaggacggcgcagtcattgccatcccgaacgatcccaccaacctgggccgcgccctgttgctgttgaaaaaggttgggctgatcgaattaaagcagggcaaaggcctgctgccaacctcgctggatatcagtgccaacccgcacaactaccagattatggagctggaaggcgcgcagttgccccacgtattggacgatcctaaagtcgcggtggcggtgatcagcaccacctatatcaaccagataggcctgacgccgaccaaggacgggatttttatcgaggataaagattcgccgtacaccaatatcgtggtggctcgcgaagataataaagatgcgcagaacgtgcagaacttcgtgaaagcctacgagtccgatgaagtcgccaaagcggcagagaagatcttcaacggcggggccgtcaaaggctggtaacttcccccacgatcggttgcaggtgccggttgttggtgcctgcaacacttcacaaaaatccccacctccctgcttgaccctcacgtaacgtcaggctgtagtatctcagctcacaccagggagaaaaccagcatgttactgaaagtcggcgaactggcccgccgttcgggaataaccgtaagaaccttgcatcactatcacagcattgggctgctgatcccctctgcacgttctgatgccggatatcgcctctacaatcgggaagatattactcgcctgcaccatattcaagccttgcggcgaatgggagtcgcactggcagaaatcgactcgattctggcgcactcggggctggcgttacccgcggttattgaacagcaaattgccatgctcgatcgtcaactgacgcagataaccacgctgcgcagccgcttacagcatatgcacacccaattgacccatggcagtgaacccgaattgaatgattggctgatcacgttggagatgatgaccatgtacgataaatactttaccgccgatgaactggcacagctgccgttctatcaggccgacgaagcgcgtaatcgcgaatggcaggagatggtgaacacggtgcaaacgctgatggacggtggggcaagcgccgaagatccgcgtgctcaggctattgcgcgccgctggatgtgcacgctggagcgtgataccgcaggcaatccggcatttctgacccgcctcaacgccatgcacgccgatgagccttcgatgcgcgaacaaacggggatcacaccggcaatgaccgattacatcacccgtgcctttgccgaaaccaagctggcgatctatcaaaaatacctgtctgataccgaatatgcctatgtccgcacgcactattttgatcgcattcaggaatggccagcgctgattgcccaattccagcaagcgatgcagcaggaggttgctcctgcatcgacacaggctaaacagttggcggcccgttggctggaactgttccagtcctatgccagtgacaatccggccacccagatgaagatccgccaggcgatggagcaagagccgacattgaccgagggcacctggctcacccccgcgctgttggactatctacgccagtgcgtcgcgcaactgatgcggcggtaacccgtgtcccctcaccccaaccctctcccacagggagagggagctagagcagggtcgtcgtcaggtgtgggagatggtctgtaacttcacctaacaaggcatgatttgagtcagatgcggacgttaatctgtagcacgtaagttgccattcgctaataggaagccgaagttaggcacggaaacagatttgtggcacgttcggtcccctctccctgtgggagagggttagggtgagggcgaggggcaacacctaacgcaatgacatacctttcttcacctaacacatttctctgcatgaaaaataccatcattttttcttatccccgccagacaaaaagccaatttatcttgtcgccaggcgcggtgcataatgccttggtactctgatttatcatcataaaagggagcactatgtcacttgcaaccccaccgctggcaacgctaagcgtctccgatgccagcactgaggatatggcggccattcaacagatttatgctcatcacgtgctttacgggccagcctcgttcgaagaaacgcctccaacgctggaagagatgcaacagcgccgccataacgtcttggctgcggggttgccatggctggtggcgaagatggaagaccgcgttgtgggctattgctatgccacaccgtatcggccacgacccgcttatcgttataccatcgagaattcggtctatgtcgccgaaggcctgcaagggcacggtattggcaagacgttactcggcgcattgattgcccgctgtgaacacggcccgtggcggcagatgctggcaacgattggcgatgctgctggcaatgcaggctcccttgccctgcaccgcaagctaggcttcaccagcatcggcaccctaagcggcgtcgggtttaaatttggcggttggctggatacccacattatgcagcggccactgaatggcggcagccatacgctgccttaggccctttccgggcaagctgctgattttcatctatagttaattctgtcgtggcttggcgatctcagcgtgcattcacgcattcactaaacataaacagtcgggagagacggatgaaaatttttctgtggattattgcgattatctttattgttggcctactgaccattaccggtgtgttcaaactgatcttctagttctcaccaccattgggcgcttcaatgcgcccgatggtggatagagagttgattgagaagggtctgccgtatcctctttgcatcaagccttaaaacgagcccgcaccgaaccgatcccagagaccaccagcatcacaacgccaccggcgatcaggccgaacactgcattcaacagcataggggtcagcccccccaggatcgcacctacgcccggtaccaccatagaataactagcccagtcggtgaacagatgatgcacaggcggtagcccgtgggtcaaaatcccgccgcccaccataaacatggccaaggtacccaccaccgacagcgttttcatcagataaggtgccgcactgacaatacctcgccctaacgattgcgccagcgcgctactcttacgggccaggtagaaccccagatcgtccagcttgacgatgcccgccacgatgccgtacacccctaccgtcatcacaatggcgatgccacacagtacaatcacctgctggctaaaggtggctccggctacggtacccagcgtaatggcgataatctcggcagagagtacaaagtcggtacgaatggcacctttgactttgcgctgttcatagaccgtgacatcttcagtggtatctggttccgctttctcctctgcctctgcactcttgcggtgtgtcaggctgtggtaaaccttttcaaacccttcgtagcagaggtaagccccaccgaccatcagcagcggcgtaatcgcccaaggggcgaaagcgctgatcagcaatgccagcggtaccaggatcgccttgttgataaacgagcccttggccaccttccacaccacgggaatttcacgatcggccttaacaccgctgacctgttgggcgtttagcgccagatcgtctcccaataccccggcggtctttttggccgccattttcgtcatcagtgaaacatcatccagtaacgaagcgatgtcgtcgatcagggttaataagctactgcctgccaaaatgcactttccttatcaaagggtgggatagccataccggtttagcatagcgggttgaaaacttgaagaggggaaatcctaatgattttactgtagctgcgggcttaagtggtgaattttgcaccatagggaaaggataacctgccgcgactggcggcaggttaaataacgcgttattccgtgtcgttcttcgccagggcggcatctttctggcggcgatagtcccgcgctgccgccgggatcggcgttactttgccggtttcaatccaggtgcgcagacggctggcgtccgcgaaatgggtatatttgccaaaggcgtccaacaccaccagcgaaacggaacggttaccgatcaccgtacgcatcgccagacaatgcccggcctgattggtaaagccggttttggtcagctggatattccatttcgggttgtagaccagatggttggtattgcgaaacggcagcgtatagttgggatccttgaaggtcgccatccgttcggtagtggtgctcaactggccgatcagcgggtactgcttggtcgccaacatcagcttggtcaggtcacgcgcggttgacacgttatgaatcgatagcccggtcggttcaacgtaatgagtattggtcatgcctagcgctttcgccttggcattcatcgccttgataaaggcgttatagccccctggataatgatgcgccaagctggccgcagcacggttttccgacgacatcagcgccaacagcagcatatccttgcggctgatttcgctgttcaaccgcacccgggagtagatccctttcatttctggcgtctggctgatatcaaccgacagcatttcgtccagcggcaagcgggcatccaacgtcaccatcgccgtcatcagcttggtgatcgaggcgataggcaccacttcatcggggttacgtgaataaatcacccgatgcgtttgcatatccagcaccatggcactgccagaagccagctcaggctgggaggcctgcactgcggcggttttattgctggctaatgcactcggcaccagtccagaaccggcttgcaacgcgagcagggttagaaccaaaacacggattttcacatgtattactctgtaacggaggagagaaccgactgcgttgaattataagtgagggatatagaattgcactgtgattgtgagtagctatttgtgacaaaatctatcggcgcgaaatttatgcaacccgcgagcgtactgggttgtacgcccgcaaggtaaaagttacagcgctggctgccaggcagattgtggcaacaggtacaatccggcagcatgctgctcaccggcccccacgatatgcccgataccggcggccatcacggctagggtcacatcgaaggcattcaggctgtcgccgtaacctgccgtcaggttgaacatcgacccgttggccagcagatacagcgttttgtctgccagttggtaagcattcacaaatggcattggctcgctgtgcggcagagcctgcaggaaaccgacgtcaatctcttccgccacatgcccaacgttgaggatgaacaccccatccttggcccgctccagatgccgtgctgacaacacgtttttggctccagtggccgtggcaatcacgtccgcctgctctacggcagtggctaaatcgactaccgcccagccatcgtagcgtgcttgcaaagcacgggccggatcgatttccgctacgataacttgtccaccataagccttggcagaagcggctacgccctgtcccaccagcccataaccaatcaccaccacacatttttcatgcagcgtcagatgagtggtctggaagaaggtatgccaggcggtcagcccaaccatgtggcgattatgcagcccttcttttaccggcaggtcatcccagttaaagatcgggtaacgtggcgcaatgccccccaagcggctgatgcctgaaccggtcgcttccagcccagccttgatctgcgggccattggcagattgatgcaggcgagtggtcagatcggctcccatctcacacagatgagtcggcccccaggccagcgcacggtcgaacgattcagaccagtcggcatcgctcatatcacgccaggcgtgcgcttgggcaccgtgacgctccagccaggccactacatcatcctgtaccgtcgtcgggttacaggtggtgagataaatggccgcgcccttatccagcagcccggctaccagcggggccattttcagatccaggtgcatgttacacgccaggcgcacgccgtgcaggtccggtaaagccgctactgccgcgcgggtacgtggcatatggcgcatggcccacttcaactcactgtcaaaatcctgatacatcggttactcctctactacgccacgccgccagggcatggcagaatgattaatctgcatcgcatggcggctattatcacttatctcaccgcaaaaaaccgaggtgactatcatggcaacagcatgagtgatggtttttccgatctatcagggggaggaaccttcgaagggattgttcagcaggtgcgggccgcgatggtgcaactcacggcccggtatcaatgataaggttagaacaggtaacgcacgcctaaagcaaactcactggaaaccaggcgtgctttcatttgctcatcttttaacccacgggcattggtaaagttattgtaaccactttcaatcttgcccatatccacgtagcggtagcccaaatcaagattgagccgctccatggccgcatagctgatccctgcgccaatggagtaagccagattattttgcgtgcttgccgcgtattggcgcgaggtattaccctgccagccgtcggatttcactttggcgatacccaggccgaccgtgccataaagcgagaagtcataccctagcgcgtagtcacgataggcattgagcatcaggcgctcagcgtccactttgtggtgattgtagctactggcaaaggtggtagagccgctggtgtattcgcttttctttttgaacacatactctgcctcactgcgccagccattgccaaattgatagcctgcggcgatagccccgttatagaaattatgcttttcgtcaccgctgacaaaatcacccacgccaggacggctgctggtattcatatcttctgccgactgtctggcgtgcaatagttttatcgccccatagtatccctctaaataatcatcggctaaaacattaccggaaacaacggagagggaaaccagcagtaccagaggtttaatattcatgcgatcctcgcttgaaaggttatttatgataaacaatgaaggttcagctaaaataaccagcgcgcagcggtgtcgcaattcggttgaatacctaaggctctaggtgtttttacttaactcttgttgaagaaaacagctcaccatagactttcattaacttcaccgacgagttgatcgccaatttggcaaataaattggcgcgatgggcttctaccgtgcgcggcgaaagctccagttcctgagcaatttccttgctggatttcccttgcataatcaacccggtgacctccagttcccgtgctgacagcgcattgagcctctcttgcaactcggcggtggcttgccgctgttgctgaaaaatacgctgatgctccaaggctccagcgaccgtttcaatcaacagatcggcatcaatgggcttggtcagaaattcaaaagccccgtttttgaaggcccgccgacataaatcaatattcccgtggccagtcatgatgataacggggatctccaggccctgctgttgccactcttccagtagcgtgataccgctttttcccggcatgcggatatccagcagcaaacaaccgcacagcgcctgcggttctcccatccgctgttgaaaatccagactattttcataagccagcgtttgccaccccatggtggccaatagtgaactgagtgaactacggatggcccgatcgtcatcaatcaaataaataaactgttccatcactcctcctgagtgttaaacgggaaccacagggtaaaacgcgctccctgaccggccatattttccaccgtaatagtaccgttcaggcgctgaaccagagtttctgtcagcgccatgcccagccccaatccctcctggcgagtcgtgaagaagggaataaagacctgttgtaatgctggttcagaaagccctggcccaccatcggtaatcatcagttggatcccttgagccgagtattcagcatcgattgccacccagcctggctccggctgattgggctgttgtgcctgaatggcattggtcactatgttatggaagatttgttcaacccagagaggatcggctcgcagaggaggtaacgcatcgggcatccggttaacgatcctgaccttgcccttgttgatctcatcttccagcagcatagtgacacgcaaccagaccttatgcagatcgacctcttgcaataacacctgctcgtgcgccaacttttgccgaaattgcagcagcaacgtgctgatgcgtttgatttgtatcactgccgcatcaagcaagggcacggctttatcctgctgctgttggtctaacagacgcagggcggcctggttataacttaacaccgcagtcagcggctggttgagctcgtgaaccatactggccgtgatttcccccatagcgttaagccgcgtcaattgcgagaagtgttcacgcaaaacggcaatattgcgttggcgtttttgaatacggtattgggtgataaaatagacgacaccagcccagaaaaccggcagtagcaataacagcaaccaaggcatacgtgcccaatcagggtcgtttcgagcggataactcaaagggctgtaaggtgttgttgatccccttgtcccattgccaatacgccggttcagcatgatccccctgctcaaataaaggcttattttgccaactcaggccgatctgtcggaaatcatgacgttggggaatgtccgcaaatagcagcacaggatcgatcaacagcgcaaaatactggtgtgtcagccagtaagttccctctcccgttggcgttaaagtcgggattggctgtgcctgtggcatgcgcttccatgccacaatctgcggaaatttttgctgaacgatggtgggatcgctggacaccgacagtaaggaaagcaccgtctcaagctgggataatttaaccgtcacctcacgatataaaatacgataggtgactgattgctcttcatattgctgttgcaaagcataaattatcaccccgccccctgaaaacagagataaaaccaaccagagagcaaccttgagcataatatctccatgtcattggcagacgagtttattaatagcggattaaacactatgcgaatgcaagaatctattattaagttcgggccgtttcaattcatctcccgctgccggaacagggtgttataatcctatttcatcgcgataaaggaacaacaatgacagatctggcccactacattacccaatatggctaatggggactgctgattggctgcctgctcgnctgggcactgctgattggctgcctgctcgnnnnnnnnnnnnnnnnnnnnnnnnnnnnnnnnnnnnnnnnnnnnnnnnnnnnnnnnnnnnnnnnnnnnnnnnnnnnnnaaggggaaaccatcactctactgggaggaattgcggcacacaacggattgctgcgcctgccgctggtgattgcagtggtcgccatcggcggcgccttgggcgatcaggtgctctattttaccgggcgccattttggtgggcgggtgcttgcccgtatcgaaagccaacaagcccgcattgaacgcgcccaaaagctgattgccagccacccggttttatttgtgattggcgtacgttttatgtacggattccggattatcggcccggtgctgatcggtgccagtaagctgccaccatcgcactttattccgctgaatattctaggggctatcctgtgggccacgctatttgtactgctcggctattttggtggccaggccatcagcagttttgtcagcggtagtgacaaaaagctgtatagcctgctgttctgcgtggtgacgatcgccgttattctgctgcttcgctactggtggcggcggcgtcatgcacaataagactatttgttgagcatcagcttcaggcccagtaaggccagcacgctgccgcccaggcgatcgaaccaggctttgaaacgcaggtagatgcggcgcgggcgcggtgatgacagcacaaacgccacaaaggcataccacagcagatcgacggccagagcaatcagcggcaacacggtatacagcaccatggggatcttatggctaagcaacgccgcaaacacgctgccgaatacgatagcggtgttcgggttgcccaactgggttagcagcccggtggtgaatgcacggcgaaagcctagctgctggccgccaaccgcttcgatcatcaacggctgattggctccgcgcagcattttgaatgccagatagatcagataggccccccccagcattttcagcgtggtatacagccaaggcagcgcaagcagcagcgattgcagccccaacaaggcaatgagtgcgaagataaaacaaccgatccccatccccaatgctaccgccatcccatcgcgccgtgacgaagccaccgccgttcgcgctaccagaataaagctttgccctgggctcatcgcaccaagtgtaatagccccggtaatgctgagtaccgataatagcgtttcgttgatcatgccctttccccttgcctgattccgttaatcaaattaacgcgctggccaaaataaaagcaatagaaacgtaaggatacgtgagtaaaacttcggcgagtgcgcagcaatgtcccctcaccccaaccctctcccacagggagagggagctagtccggtactgtcgtcaggtacagagcttaggttgatattgagctagttcggtgttgtcgtcaggtacagaagctagtctgtggcatggctgatgttgaggatgaataccgttgttaatttgtggctcgatcggtcccctctccctgtgggagagggttagggtgaggggccagtcatcaacgccaccaactccctggccgccttctgttgcggctggtgcttcagccaaatcaggtgcaccggcaggcgcagttcgtttttggtatttttaaatttcaggcggatcaaccggccctgttccaacaatggcgcagttaacgacagcggaaagttgccccaccccagcccggcttccaccatgcttagcgccatcggcaaactgtcagtacgccagaaggattccgctacttgtgggcgtttatcggccataggcaaatcccggctggccaccatgatctgccgcacgttgaccagttcctccaggaacaactcggcaccgccagcacccagggctgaatgctgcgccgcaatggttgccaccaacgactcgctacccacatagtgaaaatgttcctggctgttaacgtccagcccgccgaatgccaggcacaggctgacccgctgttgatgaagcatatgcaaaacatcatcctgcggggcggtcaatacctcgatatccaacaacgggtagcgttccgccagcgctttcaccgccgccaatagaccgctgctgttgatatcagacgccacaccaatcgacagcctgctttccagcccctgagaaagctcaatggcgtggttctgcagctgcttgagctgttcggcgatcaagcgcgcgtggggagccagtgccaatgctagtgcggtgggcaccggttcgcgatgcgagcggtcaaacaactgaaagcccagctctgcttccatattggcgatccccatgctgaccgccgaaggcacgcgccgcaatgccctggctgccgccgagaatgagccgcgatccaacacggccaaaaacagttcgatattgtcactggaaaaattcatcgccccacctgtcagtaaaactgacagctcctgactttttctatcaatagtattgacgttatcttacgcatcggattgccggacgtcatcaggcacgaaaaatgaagcaggagaaagacatgcaaggcgtgaagcgcaaactggtctatgtgaccgcttatgaagttatcggtatggtcatttcggcccttggtttggcactactgtccggctccgccccaagcagcaccgggccgttggcggtgatcatcaccaccattgccgttagttggaacctgatttacaactacttgtacgaattctgggaaagccgccaggcatcacgcagccgcacgctgaagcgccgcattctgcacgcggtgggcttccaattaacgctggtggtttacttgatcccgctgatcgcctggtggatggagatttccctggtacaggccttgctgctggatatggcgctgatcgtgattatcccctgctacacctttgtgtttaactgggccttcgacaaaatattcgggctgccgacctccgccctgcctgctgccgaatcggcctgagtgaaaccctctccttctgcctggataaaatatccgttgggcagggggagatcatattggctaacctattcccaaacagtcaataagataaaaaatcttataattcaatagccaaaatcacctctcacttcctctccagacgctctcaagcctatccaactaaatgatgttgtttcatctgagcagaaagcaggcagggtaaatcgccaatggaaccgcagtttttttgcctcgattacacagaacgggtagcatgcttcgccgttatttaacgacgttggtatcaaccataaactgcggaatgttgccatgacctcattcccatgatgcaaacagacaggaacaggacgaataatgcactcagacaaaacgactgcacatgacaagcaggcggcgagaaaacgttggttggactcgcatgagtccggttaccacaaaagcatgggtaaacggcagatacagatgatcgccattgggggctctatcggcactggcctattccttggcaccggcgcacgtctacagatggctggtccggcactggcgctggtatatctggtgtgtggcgtgttttcttttttcatcctacgcgccttgggcgagctggtattacaccgcccatccagcggcagtttcgtttcctatgcgcgcgaatttctcggtgaaaaggcctcctacgttgcaggatggatgtactttcttaattgggcaatgaccggcattgtcgatatcaccgccgtagcgctgtatatgcattattggggtaccttcgccgaggttccccagtggctgtttgccctgggtgcgcttgggattgtggctaccatgaatatgatcggcgtgaaatggttcgccgaaatggagttctggtttgcgctgatcaaggtcgccgccatctctctgttcctggtcgtgggggtcatcttccttggcgtcggcacaccggtagcgggtaatacaaccggtatccacctgatcaccgataacggcggcatgttcccccacggtctgttgcctgctttggtattggtacaaggggtgatcttcgcctttgccggtatcgagctgataggcaccgccgctggcgagtgtaaagatccggaaaaaatgatgccaaaagcgatcaacagcgtgatctggcgtatcggtttgttctatgtcggctcggtggtactgctggttctgctgttaccctggaacgcctatcaggctgggcaaagcccgtttgtcacgttcttttccaagcttggcgtaccctacatcggtaccatcatgaatatcgtggtgctgaccgccgccctttccagcctcaactctggtctgtactcaacaggccgtatcctgcgctcactttccatgggggggtcagcaccgaagctgatggctaaaatgagcagccagcaagtaccttacgccggtattctggtgacctgcggtatctatgtgattggcgtggtgctgaattatctggtgccatcgcaggtgttcgagatcgtgctgaatatcgcttcactgggcatcatctgctcttgggcatttattatcgtttgtcagatgcaactgcgtaaggcgatcaaggcagggaaagccaaaccggtggcgtttaaaatgccaggagcaccggtcacctcgtggctgacgctgttgttcctgttagcggtggtgatcatgatggcctttgattacccgaacggcacctggactattgccaccatcccagtgctggccgtgctactgctacttggctggtttggcctgcgcaagcgtgccgcacaggtgaaactggaacaacaggctcacgagcaacagatcggccaataaaggttaacttatcgggtttacccagcactttcgctgggtaaacctgacgacgacacgtcacagatctaccagtagcatcgttatttaggcaaagcgtgatttcatccattcgcgcagccgttgaatatgcaggtacagcgcaggaataaagaagatcccgaccagcgttgccagtagcatcccgccaaacacggtaataccgatgatttggcggctcatcgccccggctccggtggcaaacaccagcggcatcaccccaagaataaaggagatagccgtcatcatcaccgcccggaaacgttgccgggcaccctcttgcgcggcgtcacgaatgctggctccctcttcacgccgcgccttggagaactcaacgatcagaatggcatttttggccgccaggccgatcagcaggaccagcccgatttgggcgtaaacgtcgttggcgaaccccatcatacgtaaccccgcgaccgcccccgccaccgcgaatatcaccgacagcatcaccaccagcgggacgctccagctttcatactgagccaccaggaacagataggcgaacaccagcgccgccagatagatcagcaaggcttggtcaccggtttgttgttcctgccaggacaggccgctccaactgtagccgtaaccctttggcaactgctcggccaataaagactccatggttttcatcgcctgcccagagctaaccccctcggcagcagaaccgttcactgatactgccggaaactggttgaactggctgataaaaggcgcgccgatagaaggcgtgagccgcaccagattagccaggctcaccaaagcaccggtgtcgctgcgcacgttcaggcgattaatttgttcggtacgttgccggaaatccatatcgttttgtaactgcacccggaacatgcggttattaaccgaaaaatcccccacgttcaggccgccaagcgaaacttgcagcgtattgaagatccggctgaccggcacctgcaacagcgcggcccgttcacgatcgaccgccaggtcgatatccggcaccacggcactgaaagtagtaaatacccggctcagctctggccgctggttagccgcaaaaataatcccctgggccacctgagccatctgctgcggcgtttgcccctccagcgccaacaggcgtaaatcaaaaccggcggcgttgcctagcccggcgatggccggtggattaaccaccatgatcatcgccgaggggatcgccgccagcctgccctgaagatcggctaacacccggtcaacatgctcgcgttggccccagggtttaagcatcacgatggcgaaccccgcattaggtgaattccccccgctcagcagactgaagccggtaattttgatcacatcttccaccgccgggttttgtatcacctgctgatgcatctgatccatcaccgcctgggtacgttcaagggaagccccatccggcagttgtacgttgacgaagaagtagccctgaccctcctccggcaggaaagaggttggcagacggctgtagccataccaggtggccaagccaacgaccaaaagtgcaatcaccgtggttaatgcccgcttgctggccaatgtggccaagcgaacatagccatcgcgcatccggtccataccccggttgaaaccaccaaaaaaaccggtttgcgccagctcacgccgccggatcagcgtggcacaaagcgccggggacagcgtcagcgcgttgatgctcgacaggatcaccgccgccgatagggtcacggcaaactgacgatacagctcaccggtaatgcccggtagcacagcaatcggcacaaacaccgccatcagcactaacgtcgtggcgacgatcggcccggcaatctggctaatcgccttgcgggtcgcttctgccgggctaagagagggatcttgagccagcagacgctctacgttttccaccaccacgatggcgtcgtccaccacaatggtcagcgccaggataatggcgaacaggctcaaggtgttggcggagtagccgaaagcgtacagcacggcgaaggtaccgagcagcgatactggaatggtcagcgccacgataaaggtggcccgcaggctctgtaagaacagataaaccaccagcaacaccaccgccaaggttaacgccagcgagagggcaatttcatgcagcgttgccgttaccgggcgggtggagtcatatttgatgtcatagctcatatcgctggggaaggattgcgacaggcgtgccatctcccggcgtaccgcattggcaacattcagtgcgttagctcccggcgtggggtaaaccaccaaaaatgccgattcctgttggttcatcgaagcattaacctggtagttttgcgctcccaactcgacccgcgccacgtcgcctacccgcaccgtgcccccattggcaccgctgcggataatcactctggcgaactcctgcggatcggttaaacgcccctgcccgctgatggtcaaggtttgctgctgtcgggaaggagaaggcgcggaaccgatctggcctgctgcggcctgcacgttctgctgctgcaacgcctgtacgatgtcctgcacgctgatattgagcgactccatacgctgcggatcgagccagacacgcatgctgtaatcgcgggcaccaaacacctgcacatcccccacaccgctgatgcgggccaaggcatcacgcagttggatactggtgtaattgctcaaaaacagcgtgtcacggctgcccttgggagagaacacgcttacgcccaacagcagattcgaggcccgcttgcgcaccgaaaccccgttgttattcacctccgccggtagctgcgcgctaacctgtgaaatacggttttgcacctccacggcggccatatccggatcggtgccgctggcaaaagtaatgctcagttgataaccgccgttgttggcgctggtcgattccatgtacagcatgttgctgacgccgttgacctgagcctcgatgggcgatgccaccgcctgagccacgtcgcgggcgctggctccagggtagagcgcgctgacggaaacgaccggtggtgtgatatcggggtactgttccaccgggatcaccttgagggaaacgatccccaccagagtgatcaccagagcaatcacgatggcgaattttggccgccggataaagaaatgcagcatcaacgtccccttatggttgcgcgttggcgctggagagaatggcgttcacctgcataccgggcctgacgtgctgtacaccggcgataatcaccctttcacctgggctgagcccggcgctcacctgataatattgttgatgttgttcacccagcgtcaccggccgaacttccacaatattctcagacgtgaccaccagcacaaagtggccctgctggttttgctgaagcgcagcaatgggcaccagcgtgaccgtctgcggttgctcggcggtcaggatcacgttcaccacgcccccgggcagcagtagatgatttggattggcaaaacgggtgcgcaacgtaacggtaccagtatgggcatcaatctggttatctaccgattcaaaactgcccagctctgggtaggacttgccgttggccagttcaagacgggcggaaaactgcccttcggcgagcttaccctccccacgctgacgctgataggcggcggtaatatagtcccgctcattgatagagatcgccacgcggatcggatcgagctgaataatgttgaccagtgcaccacttgccgcgttgaccaggctacccacatgaaagcggctgtggccgatgcgcccggcaatcggcgcataaattcgggtatagctgagctgtagctgctgcgtatttagcgctgcccgagcttgggccactgctgcccgggtggtatcccgttcagctgccgcagcgtcaatatccgctctgctgaccgcacggttattacctagctgttgcagacgcgtcaggtttacctgcgccagatttgccgctgccgtggcgctatccagctgcgcctgagcctgtgccacggcagaatggtgcaaggacggctcaatctcgtacagcaggtcaccggccttgaccatctgcccttcggtaaacggccgtttggcaataaacccttcggtacgggtcttcacctccacggtttgaatggcctcgatgcggccaagatagtgcaatgcgcgttcgggttggctttgttcaatcatcgccacggtcaccgcaggcagcggtgcagcaacgctcggagtggctatggccagcagccacagtgccatacaacgggatagcgaaggtttagtcatcgacggcaggaccactcattaattagttaccaagctaaattaatgaaaattatagttcacctatagcaagtcagaatgggctctgttaacgatttcttgcaaggacgcaagcccgcccaccagcggtttactgcgccgtatagccgccatcaatgctgtaaaaagccccggtggtgaaactgctgtctgtagaaagcaaaaaaaccaccgttttcgccacctcctcacgcgtagccatacgccccatcgggtgggaagcggccattttttcccgcacctgggtgggtaatctggccatcgaaggcgtatcgacatagccaggcccgacagcgttgatgcgtatccctttattggcaaactccagagctgcggcccgcgtcaaaccgataatgccgtgcttggccgcggtataaggcgcaataccggcaatgccgactatgccattggcggaagagaggttcactaccgcgccaccgcctgctgccacannnnnnnnnnncctcccgcgcccccgcctgctgccacaatagcgggcaacccgtacttcatcccatagaaagtgccgctgagatcggtttcaatcaccgcgtgccaatcatcaatggaatattcattcagcggcacatcgtgcggcccggtaataccggcattgttgaccagcagatgcaattgcccgccaagggccagcgtctgcgctaccgcactgcgcaccgattcaggatcgcgagcatccataaccaacggaaataccgatttgcctgtcggatcgatacgttgcgccgttgctgccaaccttgcgcgatttctggcggttatcgctaccttcgcccctcgttcgaccaactcttgagcaatagcttcaccaataccggtggaagcaccggtcaccaatgccactttacccgtaaaatcttgcataacgcctcccgatcgctttgagttaggcgttcaggctaaggcttgggcatgacagtttctggcagtggctatcctccaaaaatgctgaagcatcaccccaatggcaaaaggataaaacgaaaaagccctgacaatatttgccagggcttttaggttactgcatatttaaaattcaacattaatcaacttactaactgggtactactttcgatactgcttaaaatgtacttgtttatcacagataatattgggtattaaaaagctaactacatcctcccctatactgactgatttacaaatttcgactcacctacctcataataattagccaaggtaaagcaagctaaactggtacattccccctcgcgatataaactattgacgcatggctttactttcattgcaacaaacttacaggataaaattaacaagttgcaacattaacacttgagaaacagagccttacatcatcgcgtatggtacacaccctgcgatcgtcggtactgactacgtggccttaaagcattgtccttgagtccgaactggctcctcaacgacgacttccccatacaacagaacttcgtggcctttatcgcaatatcactaaacaacttattaaagataacctttcaatctgttatttagctaagcagctaactatcaatttcctgctgctggatactaatctacgactttttcaaactatgtcaatactgtttttaacaacatacgtttattggctaaatcgctaattttaaacggactgaaatcgatacgcatttgtctttctggttaattacagacggctttcacatgcttgcaagctcggtggccacgaccagtcaggaagacgagtgtaatgaatttgcacaagcggctctacgccagcgattttcagcaccgcacatattgcttccccgacggccacaattcccgctaatttatgcaaaatttcccgtatagcgagaattctggtggacataccacgctatctgcaacacatcggtttcacaggcacaccacaggccgatctgcaaacgctgcaacagctgcatcgctgccatatgctggcggtgcccttcgagaatttaagcattatctatcatcagaggatcgatcttagcgagggtgggctgttcagcaaaatcgtcgagcataatcgcggggggttttgttatgaattgaaccggatattcgccctgctgttgcagcagatcggctttaaggtggcgtttatatccggggaagtccacgccagagacggctcttttggcccgccgtttgaccatatggcgctaatggtgaccttggatcagccgtatctggtcgatgtaggctttggcgattctttcctcgccccgctgaaaatcaccactaccgagcaacaaccacaggccagcggcacctttcatcttgagcaagatggcgagtggtatcatctggagcgccgcaacggcgatcggacctcccacgccaagacgctgtatcgctttaccctgcaaccccggcagccggaagaatttaacgacatgtgccactatcacagcacttcgccacagtcgcactttacccaaaagctggtgtgctcccgccccacagaagatggccgcatcaccctcagcgagttaaagctgatcgtgacccaaaaccatcaccgtaaggagtcgacgctgcattcagaagaagaacggctggaagcgttgcggcactattttgccattgaactcagtagttagcggcaaatcacccgcgcaatatccttggagttgtttaacgtgcggatctcggtaaacagctccgtggcttcctgatactctttgcgcaagtaactgagccactgtttgatgcgggcgacgtggtataaaccggtatcgccctgcttttccagatgcacgtacttttgcaatagctgtaccacctgcggccaaggcatacgcggttcgttatatttcaccacccggctcaggttggggatgttcaacgcgccacgccccagcattaccgcgtcgcagccggtggcctgcatacacgcctgcgcactttgatagtcccagatttccccgttggcgatcaccgggatgctcaaacgttggcggatctcaccgatcgcctgccagttaatgcgatcggctttataaccgtcctctttggtacggccatggatggtgacttcggtcgcgcccgcttgctgcaccgcatcggcaatttcaaagctgcgggaatctgaatcccaacccaagcgcacttttaccgtcactggcagatgcgctggcaccgcggcgcgcatcgctttggccccctgataaatcagttcgggatctttgagcaaggtggccccgccgccgctgccgttgacatgtttggacgggcaaccgcagttcagatcgacaccgtaagaacccagttcgaccgcctgagcggcgttttctgccagccattcgggatactggccaagcagttgcacccgcacctgggtgccagatggcgttttgctggcatggtgcagttccgggcacagccggtagaaggatttggccggcaaccgttgatcgacgacccgcaggaattcggtgatgcagagatcgtaatcgttcacctcggtgagcaattcccgcaccagagagtcgagtaccccctccattggagccaataatacgcgcatgcctacccctgcaatcaaagagggcgcaatgatacgggcgaaaggcggtgccaacaagcctcccgccgataaaattaccccagcttacgcaccggctcaccggcaataaacgcctggatatcggcaatcgcttcccggaaataggtgcggtagttatcatccgcgacgtaacccacatgcggcgtagccagcacgttgggcaagcggcgcaatgggtgatcggcgggcagtggctctacttcaaacacgtccagcccggcaccggcgatctgcccggtttgcagcgcttcaaccagcgcttgctgatcgacaatcgctgcgcgcgaggtgttaatcaggaaggcgctgtttttcatctgcgccaacgcctggcggtcgatcagcccacggctgcgatcgcttaacaccagatgcaccgaaacaaagtcactcgctgccaacagcgcctgttttgactcggcaagttgcacaccgaattcctgtgccctttcagccgtcagattttggctccaggccacgacgttcatgccaaatgcctgagccaccttcgccatctggccgccgatcttgcccagccccagtaggcctaacgttttgccatgcaaggtgatgccaacatgttgctgccaaggtccgttggcacgtaatccgctgctttcagccagcagatgcttggccaaaccgaggatgagcgcccaggtcagttccatcggcgcttcagaaccgctggcggtgccgcaaacggtgacgccttgccgggttgccgctggcaagtcgatcgaagcgttacgcatgcctgaggtgatcagcagttgcagtttcggcaagcgagcaagcaatgcggcggtgaacggcgtgcgctctcgcattatcaccacgatctcgcagtctttgatgcggctcaccagttggtcttcatcgtcaatatgatcacgcagggagaaaacctcaacctgctcgccaaggacggaccaatccgccatcttcagcgctacactttggtaatcatcaagaattgcacacttcaatttcatctggatctcctgaaacaggcaaaaaaaaaccgccaataaatggcggttcagtatagatcatcaatcgaggatcactcagacggtttacggctatgcggacggcgcgatggagcacctgaacgtggtttgccttcaccctgcgggcgagcactgctgccgccgcgattttcacgctgaccgccaccattgccactacgctggccgccaccgtttccggtacgcggagcgccgccgccgttaccacgaggagcaccacggccaccaccagcctgacggccattgatgatcggttcggctttgatgcttgggtccggctcatagcctggcagggcaatgcgtggaatttcacgcttgagcaggcgctcaatatcgcgcagcagtttgtgctcatccacacagaccaacgagatcgcctcaccggtacgttcggcacggccggtacggccaatgcggtggacgtaatcttccggtacgtttggcagttcgtagttcactacgtgtggcaactgatcgatatccaggccacgtgcagcgatatcagtagctaccagcacacggattttgccgtctttaaagtctgccaatgcgcgggtacgtgcgccctggcttttgttgccgtggatagccgcagcggtgatgccatctttattcagctgttcggccaaatggttggcaccgtgcttggtacggttaaataccagcacctgcttccagtcaccttcgccgatcatctgggaaagcagttcacgcttgcgcttcttatcgacaaagtgaacgctctgttcaatttgctcggaagcggtgttgcggcgagccacttctaccgaggccgggttggtcagcagtttactggccagccctttgatctcatcggagaaggtcgcggagaacagcaggttctgacgcttggcaggcagcttggacagcacgcggcggatatcatggataaagcccatatccagcatgcggtcggcttcgtccagcaccagaatttcaattttagacagatcaaccgcgttctgatgttccagatccagcaggcgacccggcgttgccaccaggatatcgacgccgccgcgcagcttcatcatctgcgggttgatgctcacaccaccaaacaccaccagcgaacgcaggcgcaggtgtttgctgtaagcctcaacgttttcaccgatttgcgcagccagttcacgggttggcgtcaggatcaacgcgcgcaccgggcggcggcctttgattgggtgatcgtgtttgctcagcagctgcaatagcggcaaggtaaaaccagctgttttaccggtaccggtctgggcgctggccatcaggtcacggcctgccaataccaccgggattgcctggcgttgaattggcgtaggttcgcgatagccctgttcttcaacagcgcgcagaatttcagcacttaagccgagggtttcaaatgacatagtagagaaaaactccagatcccccctaacctaaacaaatgttcggtgcagtttccgggaggattatcagacggggcataaggaagtgctcgcacttttttgcggcagatcctcggcatgacctcgagggattggcacaaactgcagtgcaccaagcgcgagagtgtagcagaaatcgaacaagaaaaggcaattttacgtgttcaccgcacttttcgccgagcaagctcacggaaaagcaaaatgttctggcctgtggtttacattttagcccgcccggcctaaagttaatcatatgattgattaactttttgggtcaacctatgtcctctgcagaaaacccgccgctaagccctctcaaacggggtgagcaagcgcgccaacaactgctcacctccgcgattgaagtgttcggcgaatatggcctttcgggcgccaccacgcggcaaatcgcccagcgtgcggggcaaaacattgccgccatcacctattatttcaactcgaaagaggggttatatctggcggtagcccagtggattgccgactttatccaacaaaacttccgcccactgagcgaagaaatcgaacgtttctacctgctgcccgcggagcaacgccagccagaacactacctataccatctcaaaagcgggttgctggccttcagccaactgatgactcaaccccacacgctcaacctgagcaagatcatgtctcgcgaacagctttcgccaacggatgcctatccgctgatccaccagcaggtgatagccccgctgcatcacgtactttgtcgcctgttagcgggctacaccggcatcgatgagcgctccaccaaaatcgtcttgcatacccatgcgctgatcggtgaggtactggcattccgcgttggccgggaaaccctgctacgccaggcaggctggcatcagatcgcggcagacgaagcccagcagattagcgaggtgctggccgaacatatcgacattctggttaacgggctacgccagcgttatgccgtctaactttccgtcttgcagtcaaggaatattatgaacaagaaaagagttgccattgtgggtgtagcgatcgtgctgatcgccgctgcgacctatggtttctggtcttatcaacgccagcaggacaagcctttgatgctgtatggcaatgtggatatccgcacggtaaacctgggcttccgcgttaatggccggttggcctcgctggcggtagacgaaggggacagcgtgcaacaggggcagttgctgggtaaactggacgatgcgccttaccagaacgcgttgctacaggcacaggccaacgttgccagcgccaaagccaagctggatttattgcaggcaggctaccgcaacgaggagattgcccaggtgcgatccgaagttgcgcaacgccagtcggccttcagttatgccgacagcttcttccaacgccagcaggggctatgggcgaaaaaggccacctcagccgacgccctggaagatgcccgcaccgcgcgtaatcaggcgcaggcaaatttgcaggcgtcgaaagacaaactgtcgcaatacctgaccggtaaccgcccgcaggaaatcgaagaggccaatgccaatctggcactagccgaggcggcactggcgcaagcccagttggatctgcatgacaccaccctgctctctccgtccgttggtacggttatgacgcgggccgtggagccaggcaccatgctcagcgctggcagcacagtgtttaccctatcgttgacccggccggtatgggttcgtgcctacatcaatgaaaccagcctgggtagcgctacgccaggtaccgaagtcttgatcgagaccgacagccgccctggcaagccttatcacggcaagatcggctttgtttcccccactgcggagttcacccccaaaagcgtagaaacgccggatctgcgtaccgatctagtctaccgcttgcggatcattgtcaacgatgccgatgacgccttgcgtcaggggatgccggtaaccgtccatttcacaaaaccgtaaggaaccgtgatggcacaggcacatacgattgaactggtggcgttggaaaaacgctttccatcactcgataaaccggcggtggccagcttgacgaccacgttgcgcagtggcgcggtgaccggactggttggccccgatggcgcaggcaaaactaccctgctgcgcatgttggcaggtttgctgctccccagcagcggcaagctgaccgtcgcggggttggatccgatcgcacaagatcgccagttgcacgccattctcggttacatgccgcaaaagttcgggctgtatgaagatctgacggtaatggaaaatctcacgctgtatgccgatctgcgcggagtcaccggcgatctgcgtaagcaaacctttgagcggttgctgacgtttaccgatctgacccgctttaccgaacggctggcgggcaagctttccggcgggatgaaacaaaagctcgggctggcctgtacgctgcttggccaaccccaggtattgctgctggatgagcccggcgtcggcgtcgatcccatttcacgtcgtgaactctggcgaatggtgcatgagctggccaacgatggcatgctgatcctgtggagtacctcctatctcgacgaagccgagcagtgccgcgaagtactgctgatgaacgaaggcgagttactgttcagcggtgcgccacaggatcttacccagcgcatggctggccgtaccatcttgatcgataccccagcgggtagccaccgggcgctgttgcaacgggcgatctgtctgcctgcggttagcgacggtgtgatccaggggaaatatctgcggttgatcctcaagcagggcgaagatcatcagcaagtattgcgggatctggatctgcctcaggccgaattaaccgaggccgatccgcgttttgaggatgcgtttatcgatctgctgggcggtggcccgaacagcaaatccgccctggccgagatcatgcccacggtaacgggcgacagctcggaaacggtgatcgaagcacaggggttgaccaaaaaattcggtgactttgcggctaccgaccatgtggatttcaaggtgcagcgcggcgagatttttggcctgcttggccccaacggcgcgggcaaatccaccaccttcaagatgatgtgtggcctgctggtgcctagcgatggcaaagcgctggtgctcggtatggatctaaaaaccagctcgggcaaggcgcgccagcatctgggctatatggcccagaaattttcgctgtatggcaacctgacggtggcgcagaacctgaagtttttctccggtgtttatgggctgagtggcaagaaccagcgcgataaaatcgacgagatgtctcgcgccttcaacttcgccccgatcctcaaccaaacgccggattcgctaccgctcggtttcaaacagcggctggcgctggcctgcgcgctgatgcatgagccagacattctgtttcttgatgagcccacctcgggcgtcgatccgctgacccggcgcgagttctggctgcatatcaacggcatggtggataaaggcgtgacggtgatggtcaccacccactttatggatgaagcggaatactgcgatcgcatcggcctggtatatcgcggcaaaattatcgccgccggtacaccggacgatctcaaacagcagatagccagcgagcaaaaccccaacccttcgatggaagaggcgtttatcgaactggtgcagggctacgatcgggaggagacaacatgagcagcgacaacggcttttcctggcggcgactgcgggcgttatgcctgaaagaaacccggcagatcctgcgtgatcccagcagcgggctgattgcttttgtcattccactgatgctgctgtttatctttggctacggcatcaacctggattccagcaagctgcggctggggatcctgatggaacagcaaagcgaagaggcacgagatctgtccaatgcctttatcggctcgccctatatcgaacccaccgtcagcgataatcgccagcaactgatccagatgatgcaggctggcagtatccgtggcctggtggtgatccctaatgattttgccgagcatctggcaagacccaacgaccgcgctccgttgcaggtgattaccgatggcagcgaacccaataccgccaactttgtgcaaggctatacccaagggatctggcaaatctggcagcaacagcgcgccaccgatctgggacgtgatgacaagccgctgattgaagtccagatgcgctactggtttaacccggcggccatcagccagcactttattattccaggggccatcaccattatcatgacggtcatcggtgccattcttacctcgttggtcatcgcccgcgaatgggagcgtggcaccatggaggcgctgctttccacccaggtcacgcgcagcgagctgctgctgtccaaactggtgccgtactatttcctgggcatgatcgccatggtgctgtgtatggtggtttcggtatttgtactcggcgtgccctaccgtggctccctgctgctgttgttcgtgatcagcagcctgttcctggccagcacgctcggcatggggctgttaatctcgaccattacccgcaaccagtttaacgcggcaatggtggccttgaacgccgcctttttaccttcaattatgctgtctgggtttatcttccagatcgacagcatgcccgccgtggtacgtgcggtgacctatatcattccggcgcgctactttgtcagtacgctgcaaacgctgttcctggcaggcaacatcggcaccgtgctggtgattaacctgctgtttttgatcgcttcggcggtggtgtttatcggcctgacggcctggaaaacccagcggcggctggattaaggggaagccatgtttcaccgtctctggacgttgatcgttaaagaaatgcagtctctactgcgcgatccgcagacccgcgcgatcctgattatgccagtgttgttgcaggtggtgctgttcccgttcgccgccacgctggaagtcaccaacgccaccatcgcggtgtacagtgaagacagcggccagcactctattgagctgactcaacgccttgccaaggccaaagccttttctcacgtgctgttgttgcgcagccctcaggagataagaaccactattgataatcagaaagcgctgctgctggtccgcttcccggccaacttctcacgggatatcaccagcggtaataccgcgccgttgcagctgatcctcgatggccgtaactccaacagcgcgcagatcgccgccaactatgtgcagcagatcgtacaggactaccagaatgagctgattgggcagcgtaccaagcccaacaacagcgaactggtggtacgcaactggtataacccgaatctggattacaaatggttcgtcgtgccttcgctgatcgcgatgatcaccaccatcggcgtgttgatcgttacctcgctttccgtcgcgcgtgaacgtgagcaaggcacgttagagcagttgttggtttcgcctttaaccacctggcagatttttatcggcaaggcggtaccggccctgatcattgccaccttccaggcttcgatcgtgctgtttatcggtatctttgcctaccagatcccgtttgccggttcgttgctgctgttctacggcaccatgctggtttacgggttgtctttggtgggcttcgggctgctgatttcttcgctgtgcgcgacgcagcagcaggcgtttatcggggtgtttgtgtttatgatgccggcgatactgctttctggctatgtctcgccggtggaaaacatgccggtttggcttcagcatctcacctgggccaaccctatccgccacttcaccgatatcaccaagcagatctacctcaaggatgccggtttcagcatcatctggcacagcctatggccacttttggtgattaccgccaccaccggtagcgcggcctatgccatgttcagacggaagattgcctgaacggatccgccggttcatcgattgatgatggtggaaacgtagctaaggccggggagttaaccactctccggcttttaatattcgcgtctgggggatcgcgttttattggtgatccagcccgttttatccctcaccccaaccctctcccaaagggcgagggagctagtacagcgctagagctaactacgagagtaaaactgaggcaccttcggttccctctcctgagggagagggttagggcgaggacaccgactttccgcttttagcggcggttgccgaagatacgcaacagcatcaggaacaggttgataaagtcgagatacagcgtcaatgcgccaacgatggcgtatttgcggaagctgtctttatcatcggcattcagctgttcacccatcgctttcagtttctgggtgtcatacgccgtcaggcccacaaataccagcacgccgatataggtgattgcccacatcagcgccgggcttttcagccagatgttcaccagtgacgccagcacaataccaatcagccccataaacagcatgctgccgaaaccgctcaaatcgcgtttggtggtgtagccgtacaggctcatcgcaccgaacatccccgcagtgaccacgaaggtgctggcgatagagctataggtgtaagcaatgaagatgctcgatagcgttagcccggtcagcgccgagtagagcataaatagcccagtggccatggttccgctcaggcggttaaccatgccggaaatcacaaacaccaggcccaactgcaggataatcaacccaaagaaggtgatctggctagagaaaataaagttgatgatcgcaggcgtatgcgctgcataccaggaaacaaatgcggtcaacagcaagccacaggtcatccagccatacacctgcgccatataagcctgaatgccgctgttggcacgttcaacgatcgaaccattacgtggatatcggtccatgacggttaccttttacatgtgagccaagtttcggggaacttcccctgccaacagtaagcgtatcacagaaaacgctacgcgaaacgggcaaaggtattgatttatttccgctgttgaagctcgatttaccaacgtttggcggcttgtttatccgtatcacgagcctctacccagcgctctccctgcccggtcgcctcacgtttccagaagggagctcgggttttcaggtaatccataataaattgtgccgcctcgaaggccatgctgcggtgggcgctggtcacgccgacaaacacaatttcatcaccagggaagagatcaccgatgcgatggatcaccgttgcccgctgcaatggccaacgggcccgcgcttgtgcaacaatctcttcaagggctttttcagtcatgccagggtaatgctccaacgacagcgcgctgacgtcatcccccagattgtgattacgtaccttgccggtaaaagtcaccactgcgccgtcatcatcacactgtgccagccactggtattcttcacctacgctaaaggttgcctggccaacgcggatacgagtattttccactattaacctccggttaccggtggaaagaaagccacttcatcaccggcttgcagcggatgctctgcggccaccagcgattggttgaccgccgtcagcaatttaccgggctccagcgccagcgcccaacgatcgccacgctcgcacagcgatttacgcaactcttcaaccgtaaggtactgcgccggcaggctcagcatattggtaccgaccagttcacgcacctgcgcgaaaaacagaatagtgatcatgattccaccttaaaatcaccggacttgccgccgctttttgccagcagccgcaccgggccaattaccatatctttctgcaccgctttgcacatgtcgtagatggtgagtgcggccactgaagcggcagtcaacgcctccatttcaaccccggttttaccggtcaaacggcagcaggtttcgatacgcactcggttaaattccggctgcgcttcgagctgtacttccaccttgcttaacatcaacggatgacaaagagggatcagttcccaggtgcgcttcgccgcttgaattccggcaatacgtgccgtggcaaatacgtcgcctttatggtggctgccgtcgataatcatcgccagcgttgccgcctgcatttctacaaaagcctcggcacgggcttcacgtaccgtctccgctttggcagagacatcgaccatatgggcctcgccagcggcgttaatgtgggttagctgcgtcatagattatttctttaaatggggtaagaagttgcacgggcgatggcgcgcgtccaactgttcttcaataatacgttcccaggcggtgcgacaggcgcgggtggaacccggcatggcgaagatcaccgtctgattggcaataccggccaaagcgcgggactggatggtcgcggtgccgatctcttcgtatgacaccatgcggaacagttcgccaaacccttccacttcacggtcaaacagcggcaataacgcttctggcgtattgtccccggaggtaaagccggtgccgccgttaatcaacacggcctgcacgtcatcgctggcaatccatgcggaaacctgcgcacggatctgataaatattgtctttgaccagggcacgtgccaccacctgatggccggtttcctgcgcggcttcttgtagatattgcccggaggtatcttccgcttcagtgcggcgatccgaaacggtcaaaatggcaatctttgccgcaataaattcactgctggtttggctcattgtgtgttgtgctcctgattgtcgatggcccctcaccctaaccctctcctttagtgagagggggaacgttcgagctggtattcatcatctgacgttccccattgctacaggaaatcgtatcaaccgccgataaacgagaggttctgcgtgagaccgctattgccctgatgcaggaagtgggtctgctttttggtttgcagcccgctttgaatgcgcattttcagctgttccaactggccgtcatccgccagtagatcgcgcagggtaatcccttgctcaccaaacaggcacagatgcagattgccaatggcggaaacccgcaggcggttgcaactggcgcagaaatctttttcgtacggcatgatcagccctatctcgccctgataatccgggtggctgaatacctgcgccgggccatcactgcggccacgaacttggcgctgccaaccctgctgctccaactgcaggcggatcacttcgccagacacatggtgcttgcggaacagatcgctgccatcaccggtttccatcagttcgataaaccgcagttggattggccgatccttgatccagttaaggaagctgcccagttgctggtgattgacatcacgcatcagcaccgcattcacctttaccttgctgtaaccggcggtaaaggcggcatcgatgccctccatcacctggcggaacttgtcctggccggtgatggcatgaaactggcgtgcatcaaggctgtctacgctgacgttaatcgccgtgaggcccgcatcacgccaactggccacatcacgtgccaggcgatagccgttggtggtcacagccagggttcggatcgccgggttttcgcgcacggcggcaatgatgtcggtaaaatcgcggcgtaaagaaggctcaccgccggtcaggcggaccttttcggtacccagttcggcaaaggcacggctgacgcgccgaatttcatccagagagagaaaggccttggggctgccgctcggcttatagccatccggcagacagtaggtgcaacgaaagttacacacgtcggtgatcgagaggcgcaaatagtaaaatttgcgctcaaaagcatcaataagttgcggcacctgtaacaccttccaaatacgggagatgcgagcgtttccactctgcaccctggtggctgacttcgccacggccaagataccctatcgctccaaagaacaacgtaggtaccaaggctaggagttttgatcccatccccgctacctcaagtagccggaacgaaaccgtggttttcctgagaattctagcgctaaacagccgcgatagccaatgtggattaacgctatatagttgtgtatacagcgttttttcaccttctcaagtctggataaccataataaacaaccgttatgccagcgaattgaccagaatcacgcaaatcgcactctttatcgcgtttttgtgccaaatccgctactttatgcaggcagtctacctaccctgagttaaggaattttatgcgcaaccgtaccctggccgatcttgatcgcgtcgtggcattaggtggtggtcacggtcttggccgtgtgatgtcttcactgtcctcgttgggttctcgcctgaccggcattgtcaccaccaccgataacggcggttctaccggccgtatccgccgttctgaaggcggcattgcctggggtgacacccgtaattgcctcaatcagctgattaccgagcctagcgtcgcctcggcgatgtttgaataccgttttagcggcaacggggagttggcagggcataacctgggaaacctgatgctaaaggccttggatcacctgagcgtacgcccgttggaggcgatcaatctggtacgtagcctgctgaaagtggacgctgcgctgatcccgatgtcggaacagccggtcgatctgatggcccacgatcatgaagggcaccaggtctacggtgaagtgaatatcgaccagctaaggattatgccgcaagagctgatgccctccccgccggtacacgccacccgtgaagcggttgaggcgatcgcgcaggccgatctgatcctgatcgggccaggcagttttcttaccagcctgatgccactgttgctgcttgaggatctgactcaggccctgcgacgcagcagcgccaatatggtgtatatcggtaacctgggccgcgaactgagcgtcgccgcagccgcactgacgctgcaagacaaactggcgctgatggaagaaaagattggccgtaaaatgattgacgcggtgatcgttggcccggcggtggataccagcgccatgcaggatcgcattgtggtgcaacaaccgctggaagccagcgatatcccatatcgccacgatcgccagctattacgccaggcgctggataccgcgttggtgcagctagctagccgcgattaatcttgaccacggagccaaggattatcgctaacgctgtcgatgtagagatcttccacctgcttgcgtgcccacggggtgcggcgcaagaacttgaggctggatttgatgctcggatcgctgctgaagcagttaatgcgaatacgctctgccagcccgttccagccatattgggctaccagcttgttcagcagttgctccagcgtaatgccgtgtaacgggtctttggatggggttgcggtcatggcggctactcatctcaatacttggggcgcacaccttaatcagcaaacgggcatacggcaagaaaatttaccggggcgcgcataccacgccccttgggttcactatgatagcgcgataaactgctcgcgcaattggtggatttcatcacgcaccgcagcggcctgttcgaactccagattctgcgcatgggaatacatctgtgcctccaactcctggattttttgctccagcgctttgggggtgagcagtttgtattgcaccgcgctctctgccgctttacccttccctttgtgcttgccacggctgcttggttgcccaagttgcagaatatccgaaaccttcttgttcaggccctgaggtacgataccgttggcttcgttatgcgcctgctgcttggcgcggcggcgttcggtttcaccgatcgccttggccatggaatcggtgatcctgtcaccatacaggatcgctttaccgttgaggttacgcgccgctcggccaatggtctggatcagtgagcgctcagaacgcaggaacccttccttgtccgcgtccaggatcgccaccagcgatacctctggcatgtccaggccttcccttaacaggttgatacccaccagcacgtcaaactcgcccaggcgcaaatcacggatgatttcgacacgttctaccgtatcaatgtccgagtgcagataacgcacccgctccccgtgctcttccaggtattccgtcaggtcttctgccatacgcttggtcaacgtggtgaccagtacacgctcgttgatggccacgcgcttgcggatctcggaaagcagatcgtccacctgagtagtgaccgggcgcacttcgacgatcggatccagcaggccggttgggcgcaccacctgatcgataatatcgccgccggatttctccagctcatatttgcccggcgtggcggacacgtagatagtttgcggtgccgcagcggcaaactcttcaaaacgcatcggccggttatccagcgccgaaggcagacggaaaccgtactccaccagcgtctctttacgcgaacggtcgcctttgaacataccgccgatctgcgggatggtgacgtgggattcatccaccaccagcaatccgtctgcgggcaggtagtcgaacagggttggcggtggctcgccctcaccgcgcccggaaagatagcgcgagtagttttcgataccggagcagtaacccagctcgttcatcatttccagatcgaactgggtacgctgcgtcaaccgctgttcttccaacagcttgttgttttccagcagcactttacgccgctgggccagttccaccttgatctcttccatcgcctgcacgatacgttcacgcggggtaacgtagtgagatttggggtaaatggtaaagcgtggcaccacctgctcaatctggccggttagcggatcgaacagcgacaggcgttcgacctcttcgtcgaacagctcaacgcgcagcgccaactcgtccgattctgccgggaaaatgtcgatcacttcgccacgcacgcggaaggtggcacgctggaaggcctgatcgttgcgggtatattgcagctcggccagacggcgcaggatcgaacgctgatcgatgatcatgcccttggtcaggtgcaacatcattttcaggtacagatccggatcgcccaagccgtagatcgcggaaaccgaagccaccaccactacgtcacgccgctccagcagcgctttggtggccgacaggcgcatctgctcgatatgttcgttgaccgaggcatctttctcgataaaggtatcggagctaggcacataggcttctggctggtagtaatcgtagtaggagacaaaatattccaccgcattctcgggaaagaactctttcatctcgccatacagctgcgccgccagagtcttgttgggcgccagcaccatggtgggccggttgaggtcggcgatcacattggcgatggtaaaggttttacccgagccggtaacccccagcagcgtttgatgcgccaggccgtcttccaggccctcttccagcttttggatggcttgtggctgatcgccggccggtttgaattcggaatgcagtttgaaatgtttgctcatatccccatcatctttcaggtttgcggccagacggtagcggcctaattatggaaagaccggaagatttccgccagtgcccatgatactggatataaaaccagcttcaagcggatttacgctattgcgtccgttaacggggcgcgaacgcaccggcaaggtgacaataccatgacatttttattgtcaatcactctgttatccccagattgcgtcacgaattaacttttggccgtcaatacgctaaaaaatcgcccatcggtacgttaacggtatccgttggcttgattttaattaacttattgatattaaatatatttaataaaaagacgagaatgcggacaacctgcatacaacccgcgcccgctctctgttcacaccgcttttctaagtataatgcacaaggttatccacaggaatagtggataactctcactaccccacggggggcgggagttgcggaaagaacgcttttcccaatgaaacgtcaacggagccggttttttagttattttttgacaatattatcgctttggttatgccgattaatgctaaaagccgtgataacaaaattcttcttttacctatttcgcttgccaggggttgcaagttgcggcaacaacctttagggcttgcaccaacagcttgccctgccgcacggtaacggtgcaaaaaacgcccaagttaaccttcaggccctggcagagcccttgctcaccgggctcaattcaattaacaaaacagtaacaaactgactttttcgttgcgcaacgcctgatggcctgggaattgcatttacttattcaggggcgtgaccttgcggaagaaccggaaactttggccaaaaccggctggagtctacaagattatcttcggcgaaaaagttcattgcataccaaaaagcccccctagagccgccaaacgaccggtagcggccatttttcaattttttagcctgagccgcgattaaggtaatcagcacagcatttgccacacccgggagagacaccgcttgctgcggtcaacgttatccatacgtgaatatcggtcttggaggagatgccaaatgttaagcttacgggcggtaaaccaatattatggacaacagcatacgctgtgggatgtcagccttgagttgcctcgtgggcaatgcaccctgttgcttggccgtaatggggtgggcaaaaccacgctgatcaattgcatcatgggacacctgccgatcgtcagcggcagtatgacctggcagttggcggatgagccaccgcaaaacctgttgccacagccggtagaaaaccgggcattactgggcattggttacgtgccacaagggcggcaaatcttttcccaactgagcgtagaagagaacctgcaggtagccttgctggccgggcgtggcaaggtccgccgtatgccccctattatttacaatctgttcccacggctgcaggcgatgcgtatgcgccgtgcgggcgacctgtgccaaagtgaacaacagcagttggcgttaggccgcgctctgatgctggaaccggaactgctgatcctggatgaacccaccgccggtatgtcaccttccctggcgacggagatcggcctggtgctccgtaagctgaatcaggagctgggcatgaccattttgctggttgagcaccaactcccctttgcccgccatctggctgaccgcttctgtctgatggataaaggccgtaacgtggccaatggcacgctggggcagttggatgaggggctgattgatgcctatctgacggactgattctggcccctccatgggccatcaggttaagggttcaacctggttaaatcgagatactgtcccaatgcctgctgctctacctgcggtaaatgtgggatctcgcccaacaggggcgcgggcaataggcggcaaagagtggcaaggtactcttgatgtcgttttcccggcggggtgacgtcattggcgatccagcctgccagggtcaaacctgactgttggatcgccagcgcagtcaatagagcatgattgatgcagcccagcttgatgcccaccaccaggatcaccggcagttgctcctgctgcacccagtcggcaaaggtctcatgctcagaaagcggggtaaaccaaccgcctgcgccctcgactaaaagccagtctgcacgttgctcaagatgtcgtaaaccggtggaaagccgtgtcagcgagatgggccgcccttcggcctggctgacgatatgcggcgaggtcggttctgcaaaggtgtaagggttcactacggcgtaatccagcgctacgctgctgtttctctgcagtgccaacgcatcgctgttacgtaacccttcatcgctcatctcactgcctgacgctaccggtttataaccagcacagcgccatcctgccgcgcgggcggcctgtagcaaggcactgctggccacggttttgcccacttcggtgtcggttccggtgacgaaccagcgcttaatcacgataaatcactccataagccagatgataactgagaggaaactgcccatcccggcaaggataagcagcctgcaacgcggcaagccgttggcgtgaaagcagaccagcctcgcgcccttgatgcaggtgagtcgcaccgatgccctttagcgatcgcatcagcgtcatcacgtcgggataattaagcgtttgccaatctgccgtaagctggtgccggtagggatgacaggcggcagagatgtgagctggcggcaggaagttattaacatgacgctcaccatcgacttgctgccaggcgtcgcctaactcgtgtaaagccccttgcgccaaagtagaaaacaggatcagtccgccgggccgcgtcacccgatacaactctgccagcgcaagaggcagatcgctgcaccactgcaccaccaggctgctaaaacagatatccaccgaggcggtcggcaaagggatgtgttcgatatcccccagcagatagcgatccgccgcttgctgctgacgggcaaaagccagcatccccggagccaaatccagtgcgctgacctgcttgcccagctcgcgccaacgacggctgaaataccccgtgccgcacccagcatccaatacctgctggcctggatgagacagccccatccccagtaagcgttcaccaacctcccgttgcagcaccgctgcggtatcgtagctcgccgctgcccggctgaaggccgccgccaccgcctgcttgttcaccgtatcaatggcagacgtcatacagtacctccagcaagcgatcgatatcctgtggctggtgggccgcagtgagcgtaatgcgtaaccgtgcgccccctggcggcaccgtcggcggacggatggcgctgacccacaatccctgctctcgcaggcgctgcgccaaatccagagcctgttggttatcccccaccagcaacggttggatagcggtatccgacacggttagcgttaacggcagacccgccactccggcacgaaaatgctgaatgtgtttttgcagccgctcacgtagcccatctccctgctgcatacagcttaacgccgcctgcaaggcataggcttgagcaggcggcatcgcggtgctgtaaatcagatgacgggcgaattgcagcagatactcagccaacggttcatcgcagaggatcgccgcaccgctgacgccgaatgctttgccaaaggtgacgaccaacacctccgggcgtacaccttgctgccagcaactgccgcgcccttgctcgccacgaacaccaatgccgtgcgcatcatccaccatcagccaggcccccgcctgctgcgtcaaccgatgtagttcggccaacggtgcgctatcgccgtccatgctgaacaccccttcggtgatcgccaactgttggcctgcacaggttttttgcagcaaggtggccaacgcctggggctggttatggcgaaaacgccgcagttgcgccggtgagtgagtggccgcttccaatatagaggcgtggctgagcttatccgccaggatgcgatcgtcggcctgcatcagggcagcaagcaatgcctgattggccgcatagccggaaataaacaatagcgcacgcgggtagccgagccactccgccagttgctgctccagctcatgatgagcatggcaaaaaccggtaacgtggccggaaccgccactgccaacaccgtaccgttgtgcaccctgctgccaggcggcgatcacctcaggatgttggctcaggcccagatagtcgttaccggaaaaattcacatagcgctggccgtcaagttgcagataacggccattgccgccttgattcacttgacgttgtcgataagcggctgctcctcgccgctcctccagcgcctgtgcgatccgttgctgccagctcattacagcgccgcgttgtagaattcagcggtatcggcgtgcagcaactgctcggtcagcacctgctgctgctgattgtcaccctgttcggtggcagtttgctgcggattcaggcccagcttacggaacaattgcagatccttgtcctcttccgggttgggcgtggttaacagcttgcagccatagaagatggagttggctccggccataaaacacatcgcctgagtctgctcgctcatctgttcacggcctgccgaaaggcggacataggacgttggcatcatgatgcgggcaatggcaatggtgcggataaagtcgaacggatcgacgtcgtcattatcggccaatggcgtacctttcaccttcaccagcatattgatcggcacgctctccggcggcttgggcagattggccaattgcaccaacagcccagcgcgatcacgtaccgtttcgcccagcccgacaatcccaccggagcagactttgatcccggcgttacgcaccttatccaaggtatccaggcgttcctgatagctgcgggtggtgatgatgttgccgtagaattccggcgaggtgtccaggttatggttgtaataatccagccccgcttcggccagccgttcggcctgcgcaccatccagcgtgcccagcgtcatgcaggtttccatccccatcgccttgacgccctgcaccatctgttgcagataaggcatatcgcgctcgtgcgggtttttccaggcggctcccatacagaaacggctggaaccggccgctttagccttgcgcgccgattccagcacctgttccacctgcatcagccgttcggattccaggccagttttatagcgcgaactttgcgggcagtacttacagtcttccgggcaggcaccggttttgatcgacagcagtgtgctgacctgcacctgttgcggatcaaaatgttggcgatgaacggtttgtgcttcaaacagcagttcgagtaagggtttgtcaaacagggcctgggcttgccccactgtccagcgaatgcggtcggccatttacggcgtctccaaaagggaaaaaagtgtcgtcagtgtaaagtttgcgattatactgtcaaccattctattaaaatttggtttacggttaatgtctgtttctccctgcgatattgaattcgatcgacgcaacatctggcacccttacacctccatgacccaacccttgccttgctatccggtggtatccgccaacggcgtcgagctgcaactggacgatggccgcctgctggtggatggcatgtcttcctggtgggcggcgatccacggttacaatcatccgcacctgaatcaggcagccgtgcaacagttggagaaaatgtcgcacgtgatgttcggcggcatcactcatcccgccgctattgaactgtgccgcaagctggtagctatgacgccggaggctttgcagtgcgtattcctggcagattctggctcggtggcggttgaagtggcgttaaaaatggcgctgcaatattggcaggcccgtggcgaacggcggcagcggatcctgaccttacgccacggctatcatggcgatacctttggcgcgatgtcggtctgcgatccagataactccatgcacagcctgtatcagggctatttggccacccatctgtttgctaccgcaccgcagtgtcgttttgaccagccttgggacgaacaggacattgtcccgtttgccgaattactggagcagcacgccggggaaatagccgccgtgatcctggagccggtggtgcaaggagccggtgggatgcgcatctatcatccaacctatctgcaacgcgtgcgggaactgtgcgatcgctaccaaatcctgctgattgccgacgagatcgccaccggttttggccgcaccggcaaactgtttgcctgcgaacatgccgacgtggtgccggatattctctgcctgggcaaagcactaaccggtggctatatgaccctttccgccaccctgaccacgcgccacattgcagaaacgatcagtaacggggccgcaggctgctttatgcatggtccaacctttatgggtaacccgctggcctgtgccgtcgcctgcgccagcctgtccttgctggaggaaaatcgctggcaacatcaggtcgccaccattgaagcacagcttaaacagcagctgttaccgctggtgaaatcacccaaggtggccgacgtgcgggtgcttggggcaattggcgtggtggaaatgtatcaaccggtggatgtggcgttgctgcaacgcggatttgtcgaacgcggcgtgtggatccggccctttggtaaactgatctacctgatgccgccttatatcatcacgccagaacagctcacccggctaacggcggcgatcgccgctgcggtggagtaacggttttaaggttgtattgtgtcggcaaaccgatctagcttaggggttcggtatttcagacaactgggagtcattatggcttttcgtttgtacagcaacgatctgcaagacggcgcaaaaatgcctgaacggcaggtatttaacggcatgggctaccacggggacaacctctcccctcatctggcctgggaagatgcaccagcgggcaccaagagctttgctatcacggtttacgatcccgatgcccctaccggctccggctggtggcactgggtggtggccaatatcccggcaaacgtgcatgaactgccacaaggtgcgggttccggcaaaccggggctaccggctggggcagggcaaacccgtaccgattttggaancgcagtgcaaacccgtaccgattttggaaaggcaggctatggtggcgcggctccgccgcagggtgaaagccatcgttatcagttcaccgtgcatgcgttggacgtggaaagcattccagtggacgcagaggcgagcggcgcaatggtcggttttaacatccacttccatagccttggcaaagcgacgttgacggtaaaatacagctgagaaacattgaggggcgaagcacttcgccccattttttaacccactattttgccagcacgctcacccacattgggcctttccccaccgggtaacgcgccacgtccgtcagctcaccgctgtcttggtcaatctgatgcacaccgatatggccagatttctgccctgccgcaatcacgaagcgaccgctgtgatcgatattgaaaccacgcggctgttcttctgtggcatggtggccaaccaccgcaatcttgccgccgtcttccgagacgctgaatacggtcaggatgctggcggtgcgatcgctggtatacaggaaacggccgtttggcgtgaggtggatatccgccgcccaacgggtgccggtgaaatcggcaggcatcatgtccaggctttgcaccagcgtatatttgccaccgttggcttcgatggcgaacacgtccaccgtgccatccagttcattgacgcagtaagcgaatttatcgttgccatggaatgccatatggcgcgggcctgctccgcttgccgtcgctacggcttcttggccgtgtggcgtcagttggccctgctggctcagattaaacaggcggatgcggtcctctttcaagcacggcaccagcagcaattgattggtagggtcaatattggctgaatgcggcgcggtcaggccatcgatctgctgggtaggcgcaagcactacgccatcatgaccaatcgggctgatgctggcacagttgccgctgtaagacgcggagaacagataacgtccctgcaaatcggtggaaatatgggttgggctgcctggcaaaggtgccatccctgcctcatgcaacgtgccatcttccgcaatacggtagctgacaatgccaaacgccgggcgaaccccgacatacaggtgggttttatccgggtggatcgccatcggctgtacctgccccgccacctcgaccgtttgcagcagtgccagtgagcccttgtcgtctaactgccatacgtggatctgctggctctccgggctggcgacataaacgatttgcttcatttgctctccttaatgagaaagggtaaccggtttcagtttgttctagcttacgcgacatttgtgacatggcaaccctaggctgcgtccctcaacgcggttttatcgaatggttatccggtgtaccatcgaggtaattttgttgctaactataatgagaccgctatgagctaccgtgttattgccctcgatttagacggcactttgctagacaaccagaaacgtatcttaccgcagtcgctggccgcgctggaggaagcccgtgccgccggagtgaaagtcgtggtggtcaccggccgccatcacgtagctattcacccgttctatcaggcgctgcaaatcgatacgccagccatttgttgtaacggcacctatctgtatgacttccagcagaaaaaggtactggcctccgatccgctggcaaaagagcaggccaagcaggtactgcaactgctcaagcaaaacgatattcacggcctgatgtatgtggacgacgccatgctgtatcaggagacaagcggtcatgtgatccgttctctagcctggtcagagactttgccggtagcccagcgcccaacgttgttgcaggtcaacagcctgatgcaggcggcggatgacgcgcaggccatctggaagtttgccacttcacatagcgatctcccggcgctgcgcagctttgccgaaatggtagaaaaagagctggacctggcctgcgaatggtcctggcacgatcaggtggacattgccaaaggcggcaacagcaagggcaaacgcctgcagcagtgggtggagtcacaggggttgagcatggatcaggtggtcgcctttggtgacaactacaacgacctgagcatgctggaagccgttgggctgggcgttgccatggggaatgccgataatgccatcaaggaacgtgcggatctggtgattgccgatcacctgcagccggggattgccgaagtgatccgttctcgcgtgctgaattagcaagatacccctcaccctaaccctctcccacagggagagggaaccgatcgagttggactgaaagtatcgtgattcttcatnnnnnnnnnnnnnnnnnnnnnnnnnnnnnnnnnnnnnnnnnnnnnnnnnnnnnnnnnnnnnnnnnnnnnnnnnnnnnnnnnnnnnnnnnnnnnnnnnnnnnnagattcagcttggttgaaggggcgatcgagtttgctgaggtgacctctttacttccaaaagagcaggggctaatagctccctctccctgtgggagagggttggggtgaggggccatcgcggctgatcgacacgctcttgacttgtgcatacagccactggccgggcctgatagccagatcgtcacgagcccatggggtgatccgcgcccagagaatgttctccccgaccgtcagcttcacctcaacctgccctgctacatcgagacactccaccaccttggcgggcagaatattacggatgctgctgttggctggcggttgcaacactaaagaaacgtcggcggcgttgatacgaatacgcatttggctgcccaccggcgcttcaatcccgccgccccacagccgctgatcgcccagtgccagcgcggtcatggcatagcgtgggtgatgctcaatcacgctcacactcaacacgctgctctgatcttcacgctgtagccaaggccgcagcgcgctgctggcccaaacctcctccaacccaccgtacgcccgcacctggccgtgatccaacaccatcacctgctctgcaaggcgcaagatctcgtccatgctgtggctgacatagaggatggggatgttgacgtcctgcgccagccgttccagatacggtagcagttcacgcttgcgcggcatatcgagcgaggccagcggttcatccatcagcaacagttccggcgcggtcagcagcgcccgaccaatcgcgacgcgctgtttctcaccgccggacagggtcaaaggcaagcggttcagcaagggcgcaattcctaacagctcgacaatgctgtcaaactggccgcgcatactggccgccataccgtattgcagattgccgcgtacgcgataatgcgggaacaggcgcgcatcctggaaaacatagccaacccggcgtttttccggtggcaaacagacaccgctggcggtatccaccagcgtgcggccattcagcacaatacgcccctgctgcaccagcgtcaggccaccgatggcattgatcaaggaggttttaccggccccggaaagcccgaagatcgccgtgatcccctgagccggcagattagcctgcacattgagattgagatcgccaagctgctgggagaaatccagttctaacatctataagcccatacgcttgcggccccagcgggccagccattcagaaaccatcagggcagccagtgccaacacgatggcaatcacgcacaaacgcgccgccgccgcctcggcccctggcgtttcgatcagggtgtacattgccagcgggatggtacgggtttcaccagggatattggaaacaaaggtgatagtagcgccaaactcgcccaaagagcgggcaaaggccagcaccacgccaacgatcacaccgggcagcgaaagcggtaaggtgatggtgaaaaacacccgccatggattggcgcccaaggtgcgggctgcctgttccaaacgggtatccaccgcttccagcgacatgcggatagcccgcaccatcagcgggaatgccaccaccgccgaagccaaggcagcaccacgccagctgaaactgaagctgaaaccaaaccagttgtaaagccattcgccgatgaagccgcgccgccccatggcgatcagcagcagatagcccaccaccaccggtggcaggactaacggcagatgaataatgctatccaacaacgatttaccgggaaaattgcagcgaaccaggatccaggccatcaaaatacccagcggcaaactgcagatcaccgccaggctggacactttcaggctcagttcacccgcctgccactcatactcacttaatatcatttacgcggggtgaatccataacgttcgaagatagccgcagcggccggagtcttcaggtaatcgtagaaagccgtcacggctggcgtctggtgatctttaacgatggccattggatactcaaccggcttgtggctgtcttccgggaagatggcaatcactttgaccttgtcactggccacggcgtccgagccgtaaacgatgcccagcggagcttcttcacgctcaaccatggccatggcgctgcgcacattattagcccgggccagctgaggttccagcgtggtccatgctcccaggttctgcaacgcttctttggcgtagatgcccgcaggaacatgatccggatcgcctacggacaggcggccgccgttgagcaatttggcccagtcggtttgcttattgatggtgattttatcttgtttggccgctttggcggcgatcagcaccaactcgttgcccaacagggtataacgggtgtctttcaccatcagctgcttatcgatggcgtaatccatccattgctgatcggcagagataaacatgtccgcaggtgccccttgctcaatctggcgtgccagcgttgaggaggaagcaaaagaggagacgacttcaacgtctttgcctttctggtattcggtggcgatatcttgtaaggcgttggtcagcgaagccgcggcaaacacggtgattttctccgccgcagaaacctgtgccaccagcccgcaagccaatgccacaccgccaacccagttaatccattgctgtttcattgttttctccgcaagttaactctcattacatcgctatgtaaaaaataatataacgcagcgagaacgattgtcatgcggtttatcggcaaagcgagagataacttgagaaatacccgccaagagagctcagcgggcatttgggagggggattagctgcggttttctttaggatggccaactttggagaagatgttaaacacctcgcccaagccataaatcaagcctaaaataatggccatcactaccggcaccattaccacggcaaacaacagacttttcaataattctaacatcgtagcctcacttgactgctttaaaccgctgcgtaggtttcactgtaaaccaaaacgcaggcgaaaacgcggttattttaccgactgcgggaaatttgtaaccggctaaacgtgctcagttggcgctttgcggcaaatcggcgacaatagcctgacttactgccttataaggacccatcatgcaggccgagatcctccttaccttaaagctgcagcagaaactgttcgctgacccacgccgcatcgcgctgctcaagcaagtggtgcataccggctcgatcagccagggagccaagctggcggggatcagctacaaaagcgcctgggatgccatcaatgagatgaatcaactggccgagcaaacggtggtcgaacgcgctaccggcggcaaaggcggcggcggtgcgcaggtgacccgttatggcctgcggctgatccaactttacgatctgctgggccaaattcagcagaaggcctttgacgtgttacagcaggacaatttgccgttggacagcctgctggccgccatcgcccgtttctcgttgcaaaccagcgcccgcaaccagtttttcggcaccgtgattgaacgcgaccaccagcaggtccaacagcatatcagcctgctgctggccgacggccacacccgcctgaccgctgccgtcactcagcaaagcgccgaccggctacagttgacgccaggcaaagaggtgttggccctgattaaagcgccttgggtgaaactcagtaccgatccggcgtcgaacggcctggccgataacgcgttggcaggttccgttgccagcattcagcctggcagcgatcacagtgaggttctggtgacgctcaacggcggagaaacgctgtgcgccaccgtcagcaaccaggaactggcgcagttaaaactgagcgtcggcacgccgatacacgccttgttcaacgccgatcgggtgattgtcgcgacgttgtgttaaacgcaacgtcacgttgcagtattgccgattgacatcttttccgcttgcgcctatttctaaagcgaaacattgcagaatagggattagaagatgtcgtcgttgcacatttcgcaaggttcatttcgtttaagcgatacccgcacgctggagctggatcggcttgatattcagtccggtgatagctgggcgttcgtcggggccaacggcagtgggaaatctgcgctagcccgggcgctggccggtgagctgacgttgctgaaaggcgaacgccacagtgattttcgccacgtagtacggatctcctttgagcagttgcaaaagctggtcagcgatgaatggcagcgcaacaataccgatctgctcagcgcggacgaagacgataccggccgcaccacggcggaaatcattcaggaagatctcaacgatcccgctcgctgcgcgcagttggccgagcagtttggcatcacgcccctgcttgcgcgccgtttcaaatatctctctaccggtgagacccgcaaaaccctgctatgtcgcgccctgatggcccaacccgatttattgatcctcgatgagccgttcgacgggctggacgtcaattcgcgcgcccagctcgccaccctgcttggcgagctatcacagcagggctataccgtggtcctggtgctcaaccggtttgatgaaatcccaggcttcattgagcaggtcggcgtgctggccgattgcaccctcaccagccaggggccacggcaacaggtgatggccgatgcgctggtcgcccaactggcacacagtgaaaacctcaacggcctggcgctgccagaaaccgaagatcctacccaggtcatcaggttgccagacgatcggccactgatcgttctgcatgatggcgtagtaagctataacgatcgccccatcctcaaccaactcagttggcaagttaaccccggtgaacactggcagatcgttggcccgaacggggcgggaaaatccaccctgctcagcctgatcaccggcgatcatccgcaaggctacagcaacgatctgacgctgtttggccgccgacgcggcagcggggaaaccatctgggatatcaaacgccatatcggctaagtcagcagtagcctgcatctggactaccgggtcagctccagcgtacgtaacgtgatcctgtccggcttctttgattcgatcggcatttatcaggcggtttccgatcgccaacatcagttgacctcacaatggttggcgctgctcgggcttggcgctatgggcgatacccccttccatagcctgtcctggggccagcaacgcctggcgctgatcgcccgggcgttagtcaaacatccggcgctgttgatcctcgatgagccactgcaaggcctggatccgctaaaccgccagttggtaaggcgcttcgtggatgtgctgatccagcagggctcgacgcagttgctgtttgtttcacaccacgcagaagatgcgccgcaatgcatcacccaccgtttctccttcattcctgaaggcgatggttaccgctatcagcaagacgttctggcttaacctactcggggtgagtgctacagcgctcatcctggggacatatccggcaacacttcctccacaacgcatcacatttggccttttatcattaaagggtacagagacgtttttggagaaggtatgtccgccgcgctgattattattgacctgattgaagatctggctggccctaaagggcgggcgaatcactgccgcgagcaactcgtgacgcgggatgtgatcgcgcacgtcaatactgctgcggcctacgcgcgggtgcgtaaaatcccggtgatttggttgcgcaccggttttgccgacaattaccacgatattccccgacactcgccgctgttcaatcatctcaaacatatcggcgcgctgcgtttaagcaacgggggatgtcattggctggccgggctggaggtaaaaactgaagatctgtgcctggaaaagaaagggcttagcgcctttgccggtaacaatttgttagcctggttacagcagcaccgctgccatcacctgttgttgggcggtatcagcaccccgctagccatagagagcaccgcccggcaggcgcacgatgcgggcttacaggtaacggtgctacaagatctgtgcgccgccccaacggaagagatccaccagcaaagcctggagaccttgcagaaccttggggaggttatgcgttcacaagcctggatgaagggttaaaaccgtttgcgcacgattaactactgtcccgacctttaaattcaccctgttgtgctactatcccaattagtgctcgtttaaccagacattaacacgccggatttccggcattgagcgccgtgtatctatttaaagggatagctattatgtggggcgtactttcggcttcgttgttttttttgccatttaaccggctgattgcctcggtagtattggctgcggccgccgcaatggggggttaccatcatatcctgatgcccgtcgggctgggttatctggcggttatcgccattgccatctggcttcatcagcactatcgccaacagcgcagcatcgcgctagcgctggaagtgtttttagtcgcctgctcaatcgcactgttttatcacctgataccgggcttcaataaccaattgatggtcgatcaggacaaagtgggcccgatgagctcgctgtattccatgtattacaacttcgataaggcactggtgccctttctgctgttagcctgcctgccaacgctgtttaacgctggcaagcctgacaagcaagtcggcgtcagcgcctggctgatcctggtgctctgcatccctgcggtgctgctgttggcggtggcgctcggtgggttgaaagttgagctgcacctgccctcctggatcctggctttcatcatggccaacctgttttttgtttcgatggccgaagaagcgctgttccgtggctatttgcagcagcgtctgcgccagtggctgggagcctatccggcactgattatcaccgctctgctgtttggtgccgcccactttgccggtggcatgttgatggtggcatttgccacgctggcgggggtgatttatggcctggcctggatgtggagcggccgcctgtgggtgcccattctcttccactttgggctaaatctggtccatttgctgttctttacctacccggcttaccaatattagtccctctcaaggccggtagatttctctgccggcctgcgttgtgtaatcgctaccacttaacccaccctgttgccttccccacctcaaccgtattaaagcctcaatcgatgtaagcgattccatttttcgcgctagatcacctttttctcaccgcgagcatgctatcttctagccattattttccaaaatgcactcggctaagtcggtcacgcagcaagtgaaagcgattacaattagccccgttgcgagataaaggaagcgcaatgcctgatttcaatcctatcgatcatccacatcgccgttttaatcctcttaccgggcaatgggtgctggtctccccgcaccgagcaaaacgcccgtggcagggccagcaggaatcccccgctcaggaaacactgccagcccacgatcccgactgcttcctttgccctggcaacacgcgcgtgaccggtgataaaaaccctgactatccgggcacctacgtgttcaccaatgattttgccgccctgatgcaagataccccgcaggcgccagaaagtgacgatccactaatgcgttgccaaagcgcccgtggcaccagccgggtgatctgcttttcccccgatcacagtaaaacgctaccgcagctgacgctacccgcgctggaacaggtgatcgccgcctggcgggaacagaccgccgatctggggcgcagctatccctgggtgcaggtgtttgaaaataaaggggccgcgatgggctgttccaatcctcacccacacggacaggtatgggccaacagcttcctaccgaatgaagccgaacgagaagatcgcctgcaacaggagtatttcagccagcatcagtcccccatgctggtggactatgttcagcgcgagcaggcagacggcagccgtacggtggtggaaaccgagcactggctggcggttgtcccttactgggctgcctggccgtttgaaacgctgctgctgccaaaagcgccggtacaacgactgaccgagcttagtgcagcacaaagcctcgatctggccatcgcgctgaagaaactcaccagccgctatgacaacctgttccaatgctctttcccttattccatgggctggcacggcgcccccttcaaccaggccgataaccgccactggcaactgcatgcccacttctacccgccgttactgcgcagcgccacggtacgcaaatttatggtgggttatgaaatgctggcggaaacccaacgcgacctgaccgcagaacaagccgctgaacgcctgcgtgcggtcagtgatatccattaccgcgaagccggagtgaaataatgagtctgaagcaacttacccaaaccctgtttaccgaacactttggctacgcacccaccctgacgatccaggcgccgggccgagtcaatctgatcggcgagcacaccgattacaacgacggcttcgtccttccctgcgccattgattatcaaaccgtgatcagcggggctccacgtaacgatcgccagatccgcgtattggccgccgattacgacaaccagcaggatcagttttccctggatgaaccgatcgtcagccacgccaatctgcgctgggccgattatgtacgcggcgtggtgaaacacctgcagacccgcgatgccagttttggcggtgccgatctggtgatcagcggcaacgtcccgcagggcgccgggctcagctcttcagcctcactggaagtggctggcggacaggggttgcaggcactttatcaactgccgctggacggcgtagcactggcgttgaatggccaggaagcggaaaaccagtttgtcggctgcaactgcggcattatggatcagctgatttctgcgttgggcaagaaagatcacgccctgctgattgactgccgaactctggaaacgcgcgcggtgccgatgccagccgatgtcgcggtggtgattatcaactccaacgttaagcgcggcctggtcgacagcgaatacaacccccgccggcaacagtgcgaagcagcggctcgcttcttcggcgtcaaggcgctgcgcgacgtcagcccggatctgtttttcccgatcctgcatgagctggatccgatcgtggccaaacgggcacgccatgtgatcaccgaaaacgatcgtaccttggccgctgccgatgccttggccgctggcaacctgaagctgatgggcaaactgatggcggaatcgcacgcgtcgatgcgtgatgactttgccatcaccgtgccccctatcgatacgctggtcgagattgttaaagaggtcattggcgaacgtggcggtgtgcgcatgaccggagggggcttcgggggttgcatcgtggccctgatgccgcaggatctggtagagtcggtacgtacggcggtagctcgcgaatatccactgcggaccaacggcctgcaagaaaccttctacgtctgcaaagcttcacaaggatccggtctatgctgagtgataactccgccgttgccccagacggccagccctttattctcaccaccctgaaaaatgccgccggaatgatggtcacgtttatggattggggcgcaacctggctttccgccgtgctgcccttgaaatcaggggaacaacgtgagctgctgctggggtgccaaactccgcaagactatctgcaccaaggggcctatctgggggccacggtcgggcgctatgccaaccgtattgcacatgccagcctgaacatcgctggcaagccacacccgctgatcgccaatcaaggggagcatcaactgcacggcgggccaaacggcttccacgctcgccgctggcagattgtgaagcaggatgagcagcaggtgatttatcagctccattcgccagatggcgaccagggcttccctggcaacctctccgtgacgctgacttatcgactaaccgccgatcaccggctggaaattgagtatcaggcacagaccgatcgcgcctgcccggtcaatctgaccaaccatgcttatttcaatctggatggcgcaggccacgacgcccgacaacagcgcttgcagctgttcgccgaccgttatctgcccgtggatggcgatggcattcccagtgccgatctgacggccgttgccggtaccgggatggatttccgccagccgaaaaccctgcagcaagatttattgcgcgaccgcgatcagcaacgggtgaagggttacgaccatgcttacctgttgcacgatacctgccacgggttggcaagcccggcggctcacctgtggtctgccgatggcaaggtcgcgatgacggtgttcaccaccgcgccagcactccagctttacagcggtaattatctgggtggcacaccggcacgcgacggcggtagttaccaaaattatgcaggcgtggcgctggaaagcgagttcctgccggacagcccgaaccaccccgaatggccacagccggattgttggctacaacctggtcagcgttatcagagcgcaacgcactatcagcttattcctatctgagccgccacgccccttgtcatgcggtaaggggcgtgattgttataattgcttacattgcccccctaggccgttacctttccttattgccaaccccgcactagaatcaggctaccgtggtatgcacaagcccgtgagtgatatcacaattttcggccagttggccgttcaatagctgaaggaacacctaatgcgtctgatcactgcacttccattactggcaggtttactgctgagcaccaacctgatggctgccgacaccgcagcaaaaacgccttctccggcgcaggctgcccagcaaaaacgcatgaccgattgtaatcaacaggctaccacccaatcgctgaaaggttctgaccgtaccaccttcatgagcacctgcctgaaggccgaaggccaccataccgagaaggccctgacgccgcagcagcagaagatgaaagactgtaatgccgacgctgctaaaaagagcctgaagggtgacgaacgcaaaagctttatgagtggctgcctgaaaaaaaccgcctgatcgccttaacgccgtggcgcgggtgaatagctctcattcgcgccctgttaccagcctgaacgattcagctctttccttcgcgcccctcttaccttgcagccaaaaattggctatggttaacactatgcccaatggcagtaagggttagataatgtcgcacgtcgtacgaaaccctcgacttttagtggatatattcacgggtatatcgattgccgagtgagtagcagcagaatataatgatattcgttatcattaaaccttcagattattaaggagttaagctatggctgtaactaagctggttctggtgcgccacggcgaaagccagtggaacaacgaaaaccgcttcaccggttggtatgatgtcgatctgtccgacaaaggccgtaccgaagcaaaagcagcgggcaagctgttgaaagacgaagggttctctttcgatttcgcttacacctccgtactgaagcgtgctatccacactctgtggaacattctggacgaattggaccaggcttggctgcctaccgaaaagtcctggaagctgaacgaacgccactatggcgcgttgcagggtctgaacaaggctgaaaccgcagaaaaatacggtgacgagcaggtcaagcaatggcgtcgcggcttcgcagtcacaccaccagagctgaccaaagaagatgagcgctaccctggccacgatccgcgttattcagcgctgagcgataaagagttgccgctgaccgaaagcctggcgttgaccatcgatcgcgttatcccttactgggacgaagagatcctgccacgcatcaagagcggcgaacgcgtgatcgtcgcggctcacggtaactccctgcgtgcgctggtgaaatatctggataacctgagcgaagacgagatcctcgagctgaatatcccaaccggcgtgccgttggtgtatgagtttgatgagaacttcaagccagtcaaacgttactacctgggtaatgccgatgagatcgcagccaaagctgcagccgtcgccaaccagggtaaagcgaagtaagttttcgcccctgaaaagcaacaagcccccggtgttgagccgggggcttgtttattgctctttgatcctggccgcttcgatagcctgcaaacgcgcctgcatctctggatgggtgcttaaccactccggcacctctagtgccacggttgacgtgcttgccgcctgttgcaatgcgcggtaaagatcttccatcgccaataacgaacgcccctggcgctgcatttctgcgattgcccagtcgtctgcctcactctccacgctgcgggagaactgcatttcatgcacaaatgaggctgattgcagcaaggtatcgccgatgccgctgacatcacctgtcatccacataaacgtcagtgccaccagggatgaacgcaccaccatacgcatgggatgacggtacgcatgatgccccatttcatggagcatcaccgctgccaggccgtcgtcattggttgccaacttggccagatcgtcggtgatcaccaaagtcccatcaggtaacatgaacgcattggcaacctctggcaccgccagcaatttcaacgtgagcggagtgcgctcttgccgcatctgctccggcatcacctgcaagaacagcttctgtatcgcttgctgtttctcagcgggcaattgcgatggcttgaagccactggtttgcaggaaatcgagcgtatgcttacccagcttctgttcggccacagtaggaatacgcatggcgatttcactgctcgcccaaggaagaaccaggaaaacataggccagggtcaacaaaacggttagcaacagcgtcagcaacacgccacgcttatatcgctctaagcggtgcaccagccccggtgaacgacgttgataaaaccactggcggaatgacgcatcatcggcaggcacaaaccggcctccgtctgggaaggtcagggtcagcggaatgcggcccaatgactcggaaacggtaatttgcgctaaagaaaaatagcgatgttcgccatcatattgcagtgttactccatcgcccatatcgtttaacagcagccgggccgcctgttgggcggcccggccagggcactgatagtggccttcaaggatcatcagtctttactcaaaaactggtgcccaaatcgagcgcctgtacggcttcttctgcgatagcggtattcgccgtatcgtgatgagcctgtaccgacaacagcgacagatcgccttcaacctgagtggactcagcaatatagcgagcatgacggacgtgggccaccggagctgcaaggcccaatgagaagacggtgatcaggctgttggtgatcaacagtcccatatacggcagagtctgcatggaagaacgcagtttaacttcaccttgcaaggtggtttggttaaacacgtagttacgctgagcgacaaccatataactgctggaaaccatcacacctaacaacagcaccaacatcatcaagaacaggctaccaatattacttgccatctgggcttgtaacattgcatcggacataccgccaaacagcgccatttggaataagctgacaaggaacgagccaaccaataccaaggcgatgaccaggaatggcaagaagatcagcaggctgaacagtgcaatcttaataaactctgctttcttgaattgggctacaaatggtgaagtgccaaaacgcaggttgttcacatacagatcatgttgcagggtggccaggataccattgatagcggccagcatcggcacaaacaggatgaccgtgatagctgccagcacaacgatcgcagtcgggctgcccagactgctgccaatcacccccaatacgatcataaccgcatacagaccaatcactagcagtatcgggcagaacagtaatacccagtaagcgcgcccggtctggcataagtaattgaagcgaacaccacgatagctagacataatagcgttataacgccagctacggattataatccaagggatcaacgccaggagtgccagcatggcaatcatgccaagcaacgggttgataaatagaagaatatagaacaggatcacagcgccgatcaccagcagacggcccttgaggatttgcattggctgcgcgtgataatcaaagcggtcgccattcagttcggtattgccataaaaataacgacggcgacgcaccgttgcccaggctgagtatattcccaacgtaatagccgtcagtaatatgttaaccagccagattgcgaaatactccccacccgtaccacgaaaataaatttgatgccgagaactattgttttccatcagctattcatcctgaaattaaagtcattcaccatcatgcccttatttttatattgggtattttggttgtaaaaaacgcatcatcataatcataccgcgcggtaagagcaaattgtgtctgactagtaacagttgcgcaagatgaaaaccgcggcgggccaaaataagatgtttcctggaaataaaaagtatggccggtaacaccaacttattatcatcacaaaaggcacagcagaacgaggaaagctctacgaaattagtataatgtcagattttattctggtgttattgtttcaagagtaaattcttaaaatcaccctaggcttggccccgtagcaatgcaacagggccacaaacgcggatagcttatcggctacggcgtgccttcaccgctgcggccaaatcgcgcagtacggtttcggtatcttcccaaccaatacaggcatcggtcacgcttttgccgtaaaccagcggctcgccgctttccaggttttgatttccttccaccaggtggctttcgatcatcaccccgataatggctttttcaccaccacgcaactgctggcaaacgtccgcattcacctccaactgttttttaaactgcttactgctgttggcgtggctgaagtcgatcatcacgtttgcaggcaagcccgctttgaccagcccctctttcacttctttcacatgggccgcgctgtagtttggctctttgccgccacgcagaataatgtggcaatcgccattgccgctggtgttaacaatcgcggaatgaccccatttggtgacggacaggaaacaatgcggtgcgccagcggcattaatagcatcgatcgccaccttgatggtgccgtcggtaccgtttttgaaacccaccgggcaagacaggccagaggccagttcacggtgcacctgggattctgtggtgcgtgcgccgatcgctccccagctcatcaaatctgccaggtattgcggagtgatcatatccaggaactcgcccgcagcaggcaccccgccgtcattgatatccagcagcaacttacgcgccaggcgcaggccttcgttaatctggaagctgttatccatctgcggatcgttgatcagccctttccagccaacggtggtacgtggtttttcaaaatagacccgcatcaccacttccagctcaccgttgagctcctggcgcagggtcatcaggcgtgcggcatactctttcgccgctttggtatcgtgaatggaacaaggcccaatcaccaccaacaggcgatcgtcattgccacgcaggatgttatggatcgattggcgagcctgtgacaccgtctctgctgcctgagccgaagccggaaacttttccaacagagccaccggcggcaggagttccttgatttctttaatacgtaagtcgtcgttttggtaattcatcacttttccattcggtatcgggtgtatcgcacagcgcgtagagtagatttt

SEQ ID NO: 217 - DNA, 1467 bp, unknown
  Altogen  635822 strain
  misc_feature (1198)..(1268): n is a, c, g, or t
ccggttgccaggggcgctgtcccctcgccatgtttactgacccggttaccggccgcgtcgtacaggaagccttcccctgccacgctgtgccgatctaccttctgatgtttttggggttttcatattaatctaacttctcttcaccccctgttgcatcttttttaaatagcccctgagtatcccaagaggctaatgaatttaatgggaattaaataataaaggcctaaataataaaatgttaaggcctttggtgattgataatctatatgttattctaggactgtttcatttcctataaaaaatggagggtatttacttcctgtgttcattaccacgctgggctttctaaaccttacgcttgtttgcaattcaataaggaatggtttatttttttgtttttttaatgaaattttcacccacaatggaaaaagtgggtctaatccactgaacacgtccacgacatcattgataccaataactttctcatatatatttccattgctaaatactgtccgctgcataagctcatctttagagttataccgtttcccttcctcgattacaggggttactgtaaataataattcactgaaatcaatagaatggagatgttccattaagaataagtcctcaatagaacaaagtaggtttttcttgaatatatatctattcatcttttaatacctttgtactaactttctcaaatctctgcactaacccgctaggggtaagagtaaattcatatgtattcattgttgtgttattcaaatctaacccagtatttcttagtgccgaaggaaaacgggcagcttcttctggggtgggttgatagtgccctgatagattttccaatcttctaacttgaccttttccatttagcctgatctctcctgctgccagtacatctttagcattccccaggaaatgatgtttttcaccaatgaccagtcggccatcctgagtaactacgaaatccatttctcttttaccatcaattccttttattttcccgttctcaatggtatgcggtaatataacaccatccttaggcaacgtctcatcaggaaacttattcttaatagtgaataaacccagtgggtctatatagctaactggattgcattcagcatattgataattgtttaatccggcttttagccctgtcggatcttgagtcaaataccgcccaacacccggnnnnnnnnnnnnnnnnnnnnnnnnnnnnnnnnnnnnnnnnnnnnnnnnnnnnnnnnnnnnnnnnnnnnnnncgggtgttcatacggatcatccggcggtgtccattcctccgtcaactgcccataggcgctgtactgcccccgccatacggtattgccctgattgtccgtcaggctgtgcggcgtaccaaggtggtcattctggtaccaataggtcctgatcttcgggctgttcacccgtgtagagcccactaccgtcgccattggccgg

SEQ ID NO: 218 - DNA, 66051 bp, unknown
  Altogen  635822 strain
  misc_feature (971)..(971): n is a, c, g, or t
  misc_feature (47712)..(47802): n is a, c, g, or t
  misc_feature (65596)..(65721): n is a, c, g, or t
  misc_feature (65748)..(65862): n is a, c, g, or t
  misc_feature (65895)..(66025): n is a, c, g, or t
acatacaaggggaccgatcgagtggatatgaaaattcggtgacacgccttggataaggtgacgagcggcctgagaaataggccgatcgtcatggctaaaggatatgaaaaagtgttcaccatgtccttgaacacctgtctaccctgtccccggtctgtacagggaaagtgttgaagcaagcttgctgaaatgacctatttacttccagcagagcgccgcctatcagctccctctccctgtgggagcgccagcagctcatccgccgccgccacaatatgcgccgccgtcaggccatattcctgctgcaagaactcctgcgtccctacttgcccatagcggcctttcccccccacccgccgcatcggtaccgggcactcttccaccagtacctccgccactgccgaaccaagtccgttatgaatgctgtggttctcgcaggtgacgatcctgccggttttcgccgcaaaggttttgatgatttcacgatcgataggcttgagcgtaaacatgtcaatcaccgccgcgctgatgccacgctgttgcagttcctgcgccgcctgcaaggcttcggcgaccataatgccgttggcgatcagcgtaatatcgctgccgtcacgcagcagattagccttaccaatggtgaaacgatagcctgcgggataaatacgtgtcgcctgcttacggatggttcgcacccagtagaagccttgcaacttcaccagttgctgcaaaatatcctggaacatggtggcatcggtcacttccagcaccaccgaattcgccaggccgcgcacgatccccatgtcttcaaacgacatatgcgtgcccccgttatggctggcgctgaccccggcatcggaagcgatcaccttaacgttgttgcgctgatagtccaacgacataaacagctgatcgaaacagcggcggctggcaaaagcggggaaggggtgaacaaatggcactcgtccgcntgaaggtgtgaacaaatggcactcgtccgctcagtgacaaaccggcggccacgccaatcacattggcctccatgatgccgcagttgataacccgctctgggtgatccttatgtacgccatccatcgccatcgaactcatcagatcggcctccaaggcgatcactggcgtatcggcctcggcctgttgacggatcacgctggcgtacaccttgcgcatttctacggcgtctttttccaacggcatttccaggttaaacataggcggcctccagctcggcaatggccttttcgatttcgctgcgaacatctggcgttaagcgcagatgatgtgagtttttcaggttctccaggtaagccaccccctgccccttgaggctatcgaggatcaccaccaatggccgttgctctccactacgttccggcaatacggcatctcggatcgccgcaatgtcatccccacgaacggtttgcacctcaaaaccgaaggcgcggaatttaccggccagatcgaagggtttgatcacctcatccagcgcgccgtccaactgctgtttgttgtaatcaataaacagcgtcagattatgcaggttatggtgggcgataaactggaacgcttcccagcattggccttcgttcaattcaccgtcccccaggatgcagaatacccggttgctgcgctttgccagttggtgtgcaagcgccataccggcagcgatagagaccccttgcccgagcgatccggtggtggcatccaccccacgagttagcaagcgatctggatggctcggcaaccgggtgccattctggttgagcgtttgcagctgttccaatgggtaatagcccttaagcgccagcacgctatacagcgccgggcctgcatggcctttcgacagcacgaaataatcgcgctcaggccaattcgggtcacccggatcgatacgcatcacttcgccgtacagcaccgccagcgtttcaaccaccgacatacagccaccataatggccaaatcccagtccagtgagtgccttcagcgtttccagacggattgccccggccaattgcgtcaaatcagtcacggtgttgctcatgagctttcctccttatttttggctggggcatctttgcgtttccccaagaagttatgtgcgaccagcaagccaaagatggcgacgatcgcgaccatgatcatttctttggtcaggaagcgcgccatattgcccaacacgatccccaccacaccgaagtccgtatcggagaaggtggtgttggcaaaacccagcgcgcccagtaccggcaacaacagcaccggcaggaaggtaatcaacagaccgttggcaaatgcccccagcatggcaccgcgccgcccgccggtcgcattgccgaacaccccggcagtggccccggtgaagaagtgcggcaccacgcccggcaggatcagcaccatcttcatttggccgagcaagaacagaccggccaagccccccaggaagctgaacaggaaaccaatcaacaccgcattaggggcgtagggatagaccaccgggcagtccagcgccgggcgggcattagggaccagtttttccgaaaagccggtaaaggccgggacgatctcggccaggatcaggcgcaccccttgcagaatgatgaataccccggcggcaaaagtgatcgcctgaataatcgagtacaccaggtagttctgcccgccactcaattggctttcgacgtaatcctggcccgcgcagatagccaggatcaggtagatcacgatcatggtcatcgagatggaaatcgagctgtcacgtaggaagctaaggtttttaggtaaattcatctcctcggtggaacgcgagtttttccccaccttggagccgatccagccggaaaggacatagcccaaggtaccgaaatggccaaaggcaatgtcgtcgttaccggtaatgcggcgcatatagcgctgggcgatcgccgggaagaacgccatcaccaagcccagagtcaacgctccggtgaacaccagctgtacgccctcaaaaccggccacggtgaggatgatgccgatcatacaggccatgtagaaggtgtggtgtccggtcaggaagatgtatttcaagcgggtaaagcgggccacgatgatgttggccaccatgccaaacgccatgatcaacgcggtggaggcaccgtatttctctagtgagatagagacaatcgcttcgttattgggaataattccctgaatattgaacgcatgctcaaacatgccgcccaatggattcagcgagccgactaataccgtcgccccaccgcccaacacaataaagcccagaatggttttaaccgtacctttgactacgtcagaaaaagattttttttgtgccaataagccaatcaaggcaatcaccccgaccaataccgccgggacctttaatatatcaaccacaaacctgagcgtttcctggataaacatatccacctcgccaatgggttagattaaataatggagtgggctgcgaagtaagcacgcagcttggcttcaagctcattaatatcaataatattgctgatcaccaccaactggtcggcaggcacgctggcgctagcggcaatatcttttgccatcacgaagatatctgccgcccccggcgttgccgaggaaaggtcagagtgttcaacctccgcctcaatattcattttcttcagcactttcttgatgttcatttccaccataaagctgctgcccaatcctgagccacaaatagccatgattttcataattattacctgccaaattctatgtatgggatagcgtcacccgatatctatcggatgctgagtattatcaaaagttgcgggtaaaaccggttagagattaataattggcgataacatcctcaatttgccgtttggtttgcgccaggaacagtttctccatggcttcgctatcagaaaataactcggccagctgcgagatcatttcaatgtggctactgctatctggagcggaaagcatcaccacgatgaagaccgggtcgttatcttctgactgaaaatgcacgccctgatttatcttcaatagtgaaagaccgagcgctttggcgccctcctccggcctggcatggggcatcgcgataccaggtgccaacacgaaatagggccccagcgcctgatgttggcgaaatatggccgtcagataatcggcggtgatcactccgcgctgcagcagcggctgggcgctaagcgtgcccgcctcctgccagtcgctaacctgatcgcacagttgaatgtggtcggcgttcagccagtcgttgagcacatctcctccttatgggtatttcccttaagccgccagagtttccgacccctaacgggacgaaatctgttggctatggatcgtttgatggcgcgtggccgtcatgcaatagcccggcgacggtaaaactttaatcaacgtgctggggttaaactgtgactgaacgcacaaagatagcgctaccaaaaatcaatcatccagatctgtgatagcgctatcaaaactatcggggatgaaacccggcggcttagtttttttatcgatcacctgaggaacggggtagaatgggtacagaagcgggaaccacgaagcccagtaatggctttcaacccatgagctcatttatgcgttatgcgcgcatttcagtcaggatcagcaatgtcgatcggtagaaaacgacgcagtaccggccgggttaccctggccgacgtggcccaattggcaggcgtgggcaccatgaccgtctcgcgggcgctacgcacgccggagcaggtttcagataagctgagagaaaaaattgagtcggcggtcagtgaactgggttacctccccaacctggcggccagttcgttagcctcggcgtcttcttataccatcgccatggtggtgccgagtttttccgagtccggctgtgcggatatgtttgccgggttacagcgggtattgcaaccggcgggttaccagatcatgctggccgagtcccaacatcatatcgagcgtgaagaaacgttgctggaaaccctgctctcttacaacctggcggcggccgtgctgttaagcattgaacattctgaaaatacccgtcaggcattaaccgccgccaatattccggtggtggagattggggcaatccgcaccgacccgatcgacatcaatatcggcattgattacgtcgcagccatgtatcaactcactcaaaccttaattgccagcgggtatcaaaatattggcctgctgtgcgccaatcaggagcagtggattttccaacagcatctgcaaggctggcacaaagcgctactgcaaaaccacatgtcccctcatcgggtgattaatgccgcgcaacccgccagcttcagcctcggcgcccagcaattgccggagtttttactggcctggccggagttggatgccttggtctgtgcgtctgatgaactggcctgtggcgcgctgtatgaatgccagcggcggaggatcaaggtgccggagcagttggctatcgtggggtttggcaacagcgaggtcagccaggtctgccagccaccgctgacgaccatgaccgtgccgcataaggagattggtatccaggcaggtaaggcattgttggcacgcttgaacgatcagccctggcaaccagaaggttcgatcccttcaaccctgtgccgtcgtagcagctgttaacgatgacgataccgggaacccgccaataaggcggtattcccggtaacttaaccacacttaccagctataagagaccccaacacggtagcgcgtctggcggttatcatttttgctatcttgcttcacgttcccgacttcaacataaggcttccagtttttatcccatttgtaagccagtttgacgttatgttcgtaatcggttttaccgtcgtcaaaaataaccttgttgctgctcttatacacgtagttatattcggccgaccagtctttgtagaagttataacctaaccaaaaatcaccacggttggttttctcatccccctctgaaccttttgaggtggtgcgcttatattcgtagcgatatctgcccgccacataaatgtctttagtaaagttatactgcgcgcgcagataagggcgatagccgttattattactgttggactctagcgagaagccaggctgtagagtgattgcatcaaatttatgctgatagctgacgacggcttctgtcccattactgacctgctcgtggaaaggtttatcaggcgttgagtctgaaggatcctgacgccattttgcttccagagagaatcccaggccgttatcgaaacgatgcgagaccaacatacgatttttatgatcgcctttgccggtatcctgccattcatggcgcaaatcgagcgacatggccattgcactaaagtttgctacagaggctaacaccagagtcaataatttaaatttcattattactacccttatcattaattatagaaaagacatccccactctatttaagggggttatagtgttatttaaaatacgtattactcaataatggaaatagcgaacatttaacttaaaacaaactttatcttttttgatgaataaagattacccaacataaatagtcgtacgtgataccgcgccaccttaagcctctgacagatgggcgctatgcaggttagccgaccgttgagcgcatggatgcgcgattcgagcccccaaggacgggttcacggcgtgccggcgttctgcatagctcccagctgtatcactaaaactaacagctatttaagtaagccttatctcattgcgcgtttcagaatacggtcgccctggcgctggaaatctgtcgcgacttcctgaaccgttttcttaccataatcgatattctgaatggcatcctggaacagcacgacgatctgcgggtcatcaaaatacggcgacgcagtgatggcatgcggcagtgacagcgccagtttcaacccggaaactgctggatcgttatcctggatcgcaccactttcgcgcaactggttgacggccactttgctcagcggtacgccacgctccagcttcagtgcctcgacgccttccttactgtttaacaggaagttaatcaacattgccgcttcttttggatgcttgctgcttttaccaatcgagaacatttgcgacggtttgaagaacaatccggcatccttggctcctggcagcatcgggtatggccccagttcaagcttggccggtgccttcaggttgtcggaatatttgttgatggtggagttccacatataggttccgccccactcccccgcaatccagggtttcatctcatacatattgcttttgccgaacgaagcatagtatttcgatgacggcatgacgtggctatccaccatgtctttatacatctggaaaaagtcgacccattgcgcttcgctgtaagcaaactttttcttagactcgtcgataatatcaacgttatatttttggatcatatacgagcgcaacaaggcaaaggtatcctgatgctctaacaccaccggataatatttctcgcccagtttttcgttgaaagttttaccggcggcgagcaactcatcccagttattgggatattgcacgcccgcgtctttccaggtgacatcgttataatagaaaacgcgcgcggtcactgaaatcggaatgccgttcagcttgccgtcaatcgtggtagtttgcagctctttgggatcaaactgggtcagatccagatactcactcaccttgttcaggtcatagaacccggtgccggtttttgaaaagatcggcagccagttccagttggtttgcatcacgtccggctcggtgcccccggcaatctgggtggtcagacgtgaaaggtggccgtcccagccggtatattccgatttcaccttgatattcgggttctgtttctcgaacgcttcgatcgctttcaacgtaacctgatggcggccattgcctccccaccaggacatacgtaagtcaacctgttcagcggcaaaagcctgatgggcaaatatcgccatggacgaggctaccagagtacgtaagactatttttttcattatttactactcctgttaaagagaaatattcttttctgttttcgcatcaaaaatgtggcatttatccatatcgaatttgaagtaaaccggacgatgcagcccatttttcaggatcggtttaacgtcatcggaaggaatacggcaggtcagttcaaaatcattcaccttcaggtaaacaaagaactcatggcccatattctcgacgcggaccagttctccttcggagtggttgccctcaaacggcgactctgaaatcgacacaaactcaggccgcacgccaaagaacacgtcctgcccgacaaagctggcgaccttatcctgctgatactggctgagggtcaaggtgtaattacctacagtaaggccgattttgccgtccttctctaccagcttgctcggcttgatgttcatttctggcgcgccgataaagccggcgacaaacatgtttttcgggaagtggtacaggttatctggcgtatccacctgcatgatatggcccagcttcatcacgcagatacggtcgcccatggtcatggcttcggtctgatcgtgggtgacatagacggtggttgccggtttgccgctctttttcagctgcttgtgcaagtcggaaatacgaatacgcatcgacgcacgcagcttggcatccaggttagacaacggttcatcgaacaggaacacgtctggttttttcacaattgcgcggcccacggccacacgctgcgcctgcccaccagagagttggcgtggcaaacgatccaacagttcttccagctccaggatcttggcggcttcgttaacctgctcttcaatctgctctttaggcagcttgctcagcttcaaaccaaacgccagattgtcttttaccgtcatatgcggatacagcgcatagttctgaaacaccatggcaataccacgggatttaggggccaggttattcaccacgcggtcgccaatgcgcacttcgccgccgctgatggtctccagccctgccagcatccgcagcgtggtcgatttggcacagccggaagggccgacaatcaccataaactcgccatcggcaatggtcagattgatgccatgcaccgccttataaccgttgctgtacactttctgcagattgttaaaaatgacttcagccatgatagatcctcaattaacctttaattccgctgctggtaacgccctgcacaaagtagcgttgggccaggaagaacacgatgatggacggcagaatagagatgcttgccatagccaggatttcgttccacggcgcaccttctgtcacgtcgatagacattttcaacgccagcgcaatcgggtacttatcgacgctgtagacgtagatcaacgggccaataaagtcattcatcgaccacataaactggaacagggcgacggagataatcgccggtttcaggatcggcaccaccacataccacagcacctggaacgagttgcaaccatcaatctgggccgcctcttccatatcccgtggcacaccgcgcaagaactggatcaacataaagacgaagaacccttgggtcgcaaatgccagcggtaaatagagcggcagatagctgtccaacatgcccatttcacggaacatgatgtattgcgggatcaataacaccgtgcttggcagcaacatggtggtgatcagcgtggcaaaccagaattttttccacgggatctcaaagcgggcaaagccgtaggccacaatggttgaagagataatggttaataacaccttggggatcacaaacttaaaggtattaagcatgtagtgaccaaagttatattccgtgccggttttccaaccgttgacgaaaccgtccgaggtcgcattgtctggccacaggcccagagtggtgaagatctcctggttgggtttaaacgaggccgagaacatccataccagcggatacagcatcaacaatcccaccagcagcagcacaacgtaacgaatagcggcgctgattttttcccggcgcaatgtgcgctgaacttcacgctcagcgatttcctgcgcgctggacatgggtaattggttctgttgcatgtcagccatttttgccacccttatctgccgagtagaagacccaatacttcgatgatttaaaggcgattgaggcgaacagggccacaaccaggaacaggatccacgccaatgcggcaccgtaacccatatcaaaatatttaaaggcggtatcgtagatatacagtgagaacagataggtgtaatgggttggcccgcccccggtaatcacatacggagccgtaaactcctggaacgcctgcgtggtctgcataataaagttgaagaaaatcaccggcgtgatcagcggtaccgtgaccttcataaacatctgccacttggaagcaccatcaatcatggccgcttcatattgtgactgtggcacgttttgcagcgccgccaggaagatcaccatcgcagagccgaactgccatacacgcagcaacgtgaccgacattaatgccagtgaaggctctcccaaccagttgaccggatccatcccaaagacaccgataaagctgtttagcagcccgtcgatggcaaacaaagcacgccatagcacggcgatagccacgctgctgcccagaatcgaaggaacgtaatatgcggtacggaaaaagccgatgccgcgtagtttgaaattaagaacaaaagcgatacctaacgcaaaggccaattttaacgggatggtcagaaacacatatgcaaaggtgacgcccatggatttccaaaaaagatggtcttccatcagcatataacgatagttttctaccccgttaaacaccgggggattcatcaggtcatattccgtaaagctcagcaagaatgatgacacaaaggggaacgccgtaaatatgatcaaccctattatataaggtgatatataggctaaccccagcattctgttttcattcatggttgttacccatagccatttaaatagaaaaagaaatgaaattagttaagtaaaatttaagtacgattaaacattagaaatgacaagcccggcagtctgcccaggttcagcatcctccccgtcgtgataaatcgataaattttttcaggcgatcgctggtcaatctcagccagtgatctgcggccaatgttcgcattgtcactatgctttcgggttgcttgctacagtaggataattccatttcccggtctcccagatgatcctgtcatcgaccaaccaacaaactgaaacactatttcaaattattatatctgaaatttttccaacgtcattcagcggatggcaaaagtgtgaccaaagtagaaacgttgttttgatttttttatttaaaaacgaaaattatcaaaaccacgcaccgccgccagcacaaggcaatgaaaaataaggatattttttcttgacggatttgtagcgacaaggatagcaatgttgatgagatcggttagtcaattgtaggtaggtagaatcagcggatttgagtcgagaagggaagtatgaacgtcgtcattgatggttacatttgtgatttaaggtgattggcaaggggcgagagcctaactgggagggagaagaatagacggccttgctactctatggatagcaagcaaggccgtgcgttaaatcaggcgtcttcctcgccagagttggctctgctttcgcgcggcagcggcttaccgtgatcctggccgttattacgcgtcagccacagagataatgccttcagcgaatcgggggtgaactcgtcgcagcgggcggtgatctcctctggcgtcaaccagctcacttcagccacttcttcttcctgcagggcaaacgggccattggcgacgcagctaaataacgccccccaaatacggcactgttcctcttcaaagtagaacaggccatgttcggcaaacgggatcccggcaatacccagctcttcttccgcctcacggcgggcagagtccaacacgttttccccgctttgtaccacgccccctgcggtggcatccatccaacccgggtaaaaatctttggtgtcagtgcgccgctgcaccagaattttccccatgccatcatgcaccacaatataggtcgcacgatgacgcagccgttgggcacgcatctgttgacgactggactgagcaatcacttcgttttgctcgttgacgatatcaacccactcggtatctgcagcctgatcctgttccgccatcctgtaaaaccttcttttttgggcgcgatgcatgccgcgcacgggttatgcttcaattatttttggtatgtgtcccagctctgccaaggaacaaccctggctgccattttcgagctatcgggtctataaaattagtgcgttaacgccacctctgcaacaaccttgccgttgtgcaactcgagcacgctcaagacgtcgtctgccagtatgccatagctggctggaaaaccccctttcgggatgctgaccgagcccggattaaagcagtagatatccccttgcctttgtgcctggggcaaatgcgtatggccatacaccagcacgtctccgcgcgttaaaggcggtaatgtgttgggatgataaaggtgcccgtgggttaaaaacaatcgtcttttggctaatagcacctgttggtaaggggccatcatcgggaaggaaagcagcatctgatcgacttcactgtcgcaattaccgcgaacggcaacgatcttgtcactaacgtgattcaatcgttcggccacctgcgcgggctgataattatctggcaaggcgttacgcggaccgtgattaagcaaatcccccaacagtatcaaccaatcggcctggctttgagcaaacaattcgaggattttgtcggtggcggagagcgaaccatgcaggtccgaggcgaacatcagcttcataatctttcctttaacacggaatatgaaaccattttaacgtagctggggtagacaacaagcggtgggtaaaacaggtggccgatattcggccacctgaagaacatcaggcgcgggccagcagttctttgacaaacgccacaatctccggctttttaccgttggagaacaggcattcctggaagcgagggccgctaacggcggtcttcaccagctctggatcgatggcacgcagcgtatcaaggtagttgtctttgatcactgcctgcttaacctgattgaggataccggcgttacgaacctgaggttccttacgttctaccggataaccttcacctttacgcccggtaaaggccttctcaaagatatagcgcacgttcaactctgcaccccagccaaagcctttggcaaacggcagagacagcgcattaccgttgttgatctgagcgaacaggaaagcatccgcaggatcgatacaatagccgcacactacgccaggatgaatgttcagtgacatcaaggcgccctgcccggtaccgcagccggtgaccacaaagtcgaccgcttcggcgttcaacagaatgctggccataatccctaaatgaatataggtcagatggtgatcctgctcatcgctcatacccacgttgaacaccgcatcatgattgccagccgcaaccgcctgcaattgttcgagaaccagcgcatttttacccgcctggctgttttccatcatcagtgcaatattcatctttcgctctccgcaaataaaatcaatcggttattctttgtctggttagcgagccaaccagccgccatctaccgctacggtgtagccattgatgtaatccgacgctggtgacgccaggaataccaccggccccatcagatcttctggcaggccccaacggccagccgggatacgctcgaggatttcctcactacgagcctgatcgtcgcgcagttggcgagtattgttcgtcgccatatagccaggagccaacgcgttcacgttgataccgtggctggcccattcgttggccaacagacgggtaacccccatcacggcgctcttggacgcggtataagacggcacacggatgccgccttggtaagacagcatggaggcgatattgatgatcttgccgccggtgccttgggcaataaactggcgggccaccgcctgagacatgaagaacaccgtcttgatgttcaggttcatcacgtcatcccaatctttttcgctaaactgcagcgcatcctggcggcgaatgatgcccgcgttattaaccagaatatcaatatggccgaattcggccaccgcgcgctccagcagctcaggcagcacttccagtttgctcaggtcggctttcaggctcaggaaacgacgccccagcgcggtgactttggcgatggtttcttccggctcaaccacgttaacgccaacgatatcacaacccgcttgagccagccctatggccatcccctgtcccaacccggtgtcacaaccggtcacaatcgccactttaccctgtaatgaaaaattatcgagaatcatgctcttgtccttagtactcagggcatcagcggcccttgtcaaaagtggggatagcgttgcaatcccgccagtgtccgcagcttgctgccatacagggggagcgatattgcccgcccctgtcatcatgatggcgcaagtctaacgcttatccctgacgcgatcaataaaattgaaacaatgttttaatttaaatgaaagtaatttttgattgtgtgatgtatgccgttttcaccagggaaaagacgacgccgcaggttcatcacatgcggcgtctctaaagagggtcatttcactgctgataatataaaggcattgttgtcggcgatgttccccaccaccgcatcggcatattctcccggtttgctgcgcagcgagacgttgccgctgaatacaccctgtttatcctgcgtggtatatgggcccgggcggaaaatgtagttaaacctctggttatcaatcgccatattgttggtcacttgcagtgcgccagggttgaagttgtcggtaaacccatccatgccgttttcaatggcgaggctgttagtcacctgatgggccactggcaacccttctccccccagtttgaaaccattattgacattgcgcagcgcgacactgttctcaatgatcaccttaccgttcgggccatcctcaatcttgttaaacagatcaaaaccgtcatctacgttgtcatgggagaagcaggcgactagccgatttccctcacccacacgcattttgacggcaaacccatccgcattgatcagacctggatccttgttggcgtatgattcggaatgggtgatcaggttgtggctggcccatagtggtcgatcggcgttggccggggaggaaatgacaattccggtatcatccgcatggtgtgccaccacccgatcaaggtggttatggctgcccgtaatacgcaggcttttttccgttaccgtgatgccctgaatatcccaatggctggcttccagttccatcccgtgcagcaccacttcatccccaagcggccggagctttttggcatgcttggcagtgccactggctacggcaggtatgacagccaagggataatcccccgccgccagccaaagcgtgccgcccggcattaatgattgcacggcggtggcaaaatccagcgggtgctgctggctgccatcattttcggctttgccctgtggcgcagcatacagattagcggcgtcggcatagcgcgctttgcgcaccagcaacttgtcactctgagcgttgccttttaccgtggtgaaacggtaatccagcgcggtttccgccttcttcaacacaaccttcaccgccagcatctctccggcctgtaccttacgctctgcggcaatgaccacgccgtcctggcttagcgacagagtgccactctcattactgcggagctggaagacgtaatcctccgtggcggatattggcgcagaaccgatctcgatctgcagcggcatcgctttaaccgcgaactcttgtgccgccggaagctggctttcgctgagcgtcaggctggcctgtgtgacggtaatgcgtgcgttacgtgaagcaaagaagcccacgtagtaaccttcaggatccagcttggtgacgcggtgcggatcgttggtcgttttactgacccaattgtcgctacctagcggggcgtaggccgcggtaaacccctgatccgtgcgagccagacgcagccggaagcttggcgttttttgcagatcgacctcgggctgatagctctcacgttttatctcgacacccgcgttgccccaggagttgagcacgccattgcgggaaatcagcgtcattttgacccgctgatgatcctttttatcctgcgtcatgatggcattcatcaccatgttggatgccgccggaaactcctcataaccctgctggatcttctccaaccttggtttgccgaggatatcgcggatcagcaatcccgccccctcctgcccggcgggcagagccatattttccgggccaaactgatcgaccgtcacctccgcctccagaaccacattggcattggcaggaacgcgcgtgtagtagaaggtcaggccatcatgactattgccgattttgcccccacggctttcaacgtggaacggcattttcagcggcccggccagcatcggcttaccgttggccatcgtcacctgattggtgcccactttttccggcagcacgttggtggcaaagttgacatccgttgactggccaaaagcgacggcctgccaaaccagttcattagcggcaggcagcggtgcggcgacaccgtgatgacacacgctggccagagcaattaataacgacagaggtacgatcttcatttccctttccttgtttttaataggtagggatccccccgccatgttggcgagaagatcctgttactgggttttggtgagatcaggccggttaggccggtttatacacaggggctgaaacttcaggagtgatattcatcttctggcagatcttgctgttgccccagcactgttcgtagggcagccccaccagtttctcgatgaccaggcgaacgtcgggtttgatatcgccgatcttgccgccagccttgatgcgggccacttcgtacagcaccacctggtgagtttggcggttaagcgtcatctggctactaaagacaatcgccatcagcgccaacaagatcacaccagcaaagaacacccaggagatcgcggtaatggcggtttccggctgagtatgagacttggactggaagccgtagtaactgaggatcgcccccatggtgaagacgataatcgaacgcataatcttgccggagaaggtcatcgccccagcatagatcccttcgcgacggcgaccggtaaagacctcatccacgtccgccaggaaggtatataccgtccagggaatgtaatacacgccgccggtgcccaggccgaagatcacggtgatgccgatgatggcagcagtggcaatatgcgcaggcaagttaaagaagtgcagcagggaatagcaacagaccgcaaacatcacgataccgagcgcccaggaataaggtttactgaagccttttttcacgcacagaccaataaagatggcggtcgatatcagctgtaagatggcattcaggctgttcaatccggccagaatggcgggatcgtattgcagcacgaagatcacgaaataggtgaataccgaggcaaacagccattccgcaccaaagccgaacagatacatgcccagatgcttgcgaaatacccgcaggtagaaggtcgattgcatatcccgcgccaatgaagccaacgttttgagcaacgatttcttatgcttaacctccgctatcgcttcatccttgcgttcccaggagaacagatacagcacggtgatggcaataaacagaatcaccccataggtgataccggtatacagaaaaggctgggccgactctttgccgtagagcagaataaattgcccaggaataaacgccgccagaaagttggccatcttgccaaaaatcgctttatagccggtcagcttggagcgcatggcgaaatcatcggtcatttcggtcgccagcgtctcgtaaggcaccattaccgaggtataaatcagttcgaaaatgacgtaggtggcgaggtagtaccaaaaaccaaagccctcaacccacagcagcgggtaaaagaccatcaatggcgcaccaatcagcaagaagaaacggcgccgaccaaagcgcttaccgagccaggtattgccaaagttatcggtcagatagcccatcaccgggttgctgatagcatcgatgacgctcgcaaccgagaagatgaatgacgcctccagcagcgtcagcccacagaacgtggtgtaaaaatagagcagccaggcaccgctgattgccagcgcgccgctgcccagcaggtcccccccgccataagccagctgatgcccgagcctgaccgttcttcccttacccagagcgttaataccattagttgtcatcgtttcttctcgcaaacaaaaataatgaactgcaatttcatttttacaggaataacgttttatacttttaggcgagttataatgttgtgatgaaagtcacataaaaaataaggggatctcatttagccatttttaaaacgcgggcagcatctggccgcagccccagcatcagggattgcccatgcgttatctttctataatggcgagcatgcaacggcgtcatgctggttggctatgagcaaaaccgcgatccgccatcaatcgggcaaagcgcaacgatttatgcgatgcagctctcataaatcaaccgttcgggttggcctaattcgtcactttgatatcatttttctaaatttatgaaacaatgttttatttaattaaatgatcgcccgaaaagcggcggtttatcgataaggttaagggaggccatcgtggctaaaggttcaatccaccagttcaatttccatcgtacaaccgatgccggtaccggcgcacaactcacccgcctgacaccgcctgaagtgttgtgccaccgcaattatttctaccagaaatgtttcaccaacgacggcagtaaactgttgtttgctggtgagtttgacggtaaccgcaactactacctgctggatctgcaactgcagcaagcggtgcaactgaccgaaggcccgggcgacaataccttcggcggttttttatccccggacgatcgtttcctgtattacgtgaagaatgagcgtgagttgcgccgggtagaactgagcaactgcaatgaacaaaccgtgtatcgagtgcctgaagagtgggttggctacggtacctgggttgccaacagtgaatgcaccagcctggtgggcatcgaaatcgatcgccaggattggcaacctctgaccgactggaaaattttccacagcttcttcaccaaaaacccgcattgccgcctgctgcgtgtcgatttggccagcggtgaatcacgtgtgatctatgaagaccgcctctggctgggccacccaatctatcgcccataccatagcgactgcgtcgccttctgccacgaagggccgcacgatctggtagatgcccgcatgtggctgatcaacgaagacggcagcaatatgcgcaaggtaaaaactcatgccccaggcgaaagctgcacccacgaattctgggtgccggacggttcggccctgatgtacgtctcttatttgaaaggccagcaagagcgcaacatctgccgttacgatccacaaaccgggcaggacgagatcgtgatgaccatgccagcctgttcgcacctgatgagcaactacgacggcagcctgttagtgggtgacggttcggctacgccggtcgatatcaaggattctcaaggctacaccattgagaacgacccgtggctttacgtgttcgacgccaaacaaaaacgtcaggcacgcctggccgcgcataacagctcatggtgcgtgctgaatggcgaccgtcaggtaacgcatccgcacccatcctttaccccggacaaccggcaagtgctcttcacttcagattttgagggtgaacctgcgctgtatctagcccgcttgccggaagatctctttgcttgatggcactatttgattgaggaacaaccatgtttatctacaaacaggattgtgcgttagaagatttagggagcggcgtgacacgccgtatcctcgctcatggcggcaccatgatggcggtggaggtcaactttagccaaggtgctgtcggcccgttgcatagccacccgcacgagcaactgacctacgtactttccggccgcttcagcttcaccatcgatggcgtcaccaaagaagtagctgccggtgataccttgtacaaaaagcccgacgtggtgcatggctgcgtctgcctggaggccggaaccttactggataccttcactccacagcgtgaagatttcctgaagtaatctcatgtgctcccggccatcatgccgggagcatttgacccccaataagctgtagcaattccccccctcctcttgcataaaattgccctgttccccttgcccacaccatcaatatgcctgccgccaaaccgaccacagacgagaaatatcaataattcatatttcaaacaattaaacactcatacatacattcagtgaatatatatgagtcattctcagtaattgaccgataagttaaggattgttcttatcttttgattttattgaaataattggtaacttatcgataaaatcaattgtttttgtcatatcgatctattttattgatcattaaaaacatctctgctatcctatgtaatataaattttcaatataaatcaatggaatgagtaaatatcatggcttactgcgagtatgtcgcctattgcccacattgtgatatttccatagagctgacagggaacgttcctccctacgttgagggggcgggctgctgttggatgtgcagcaagaaactcatcctgattttcagaaagtcggcaaaaaaccgtgcacgccatcgacaagattgcggctcatccgccaacccgcgcaccagataggattattactgattaggatgatcaactatgcctgatattcatatctacacggtgagtaatgaccgctatttctccgctggcttacacgcgctgcttaggcacggtgaaaccttgccccacaataaaatagcgttgcatgaattacccttcgagaaagagacatttgaggctcacaccctgccggagctgaaaaatagcgcctgtgattttctgattttggattgcagttgcggctttattaattattacggcgcctgttccgcgctctatgccgccctggaacagggcacgctggagaccaggatcatcttgatgtatgaaaacagcctgtgcctgaccaacccggatatgtacaaccattttatcactctggataaaaatgcctgcgtagaggatatcttgctagcgatattccctcgccaaacggtgcaggatgagtttgatgccgaggtagaggaagccacgagccggcagtatctgaccggccgagagctgatcgtcatcaacgaaatctacagcggtgcacagccttatgagatcgccaaaaagctcaagctcaggctaaaaaccatcaactgctataaaaaccgggcgatgaaaaagatttgtagcaaaagaacgtttgatgcatacgcataacggcctgttcgccaggttagttcccccttcatcggcggcggtttcaccttggtcaggagttggcttaagagggttatcatcataaacctcttctgcggacgctgcacgaccaaagctgggagtcaacatcactgctttaacagtaccctctccgccgttctctagaacttttgttacttctagacattaccagatctgacattcctcttagtaccaggagtggatgtaaaaaccgcttctgttaatcatcagggaaaaaataacagcttattaacccacctctacatgctcagaaggcacatttgaaacatccagtggatatagataaaaactggttgaaaaggtgtcagaaatgtcggaagaatatgccaatattgctgagattgaagtgaattaggagcaagaaatggcatcgtctgaaacagtaaagaaaatcgttatgctggtagttgtgggcagcctggttacgggttgcgcgccattacatccttccggttgccataagaccacggcgacgggaaattgcagttctggccgctgggatgatcaggatgaatggggtgcacaagcgcgtgcaatcagggcagcaatcaatgccaaacttgttgagccacaaaactggaaggggaagaaatgcaggttgcatatagaatttgaacaggatggcacggtttcaaatttatcaactagtaacggtaataaagcttattgcgaagcggtaaaatcagcggcccagaatgccaaattcccagctttcactaaaccggagctatatcgagattttcaaaaatccggcttcgatatgcgcggttagccacataatggccatccaaatgtccgctcatcgctcatagcagacgcggttccgcccagctacataagcagaagcagactttgcaaacactaccttgagcaaatcaatggggggagcatatcctctgttctggactccaacaagcttaccctcgccatcagtactgtttcagcgcctgccagatagggttctagtagcgttggataggactttcggtagcaattggacaagctagccattcatatgaattaagcctatcggttgttggaagtgagcattcaacactattcagcagatatccccccaccaggcttggaaggaggcgagtaaaaaggtgaaattggctactcacattcttgaacgcttacattgaaatgttgctcccaccctattttggccgaaactacttttgtaccagacttcggtgctgttccagctcataatcaataaatgcgttaatcatcgtacggtaaactttttcaataatgtcttcggggagtccgaccacagcggcttctgccctgaccttatcaatgaccctctgaaccctgtcgggcgcacgaacagcatcctgatcttttttgaatccagcagctgctttcacaaaccgaccacgttcggcaatgagtgaaacaagttgggagtcgatgccatctatggcctttcttacgtcttcaatagtagaaaaatgcactctcgtactccatagctagtttaggagtacacgctatcatagctatcgatggctgtcctaccctttttaagattcctatcgggtcctgctgcctttgccacattcgcctatagagaggttgagcaagtcacataagttacgccgtctaacgggaaactgaataaattaccgttccccaggtaaacataatgccgttcgttaccggcagcggtaagttccctcccccagtagttacccccaaaccaaccgttagagtatcgactcatgctgccccattcattccataatctggcattggcatcccggttggcccctatctgggctatcggggttcggtctgtcatctcactatagctcggcaccgcgtagcctcccccttgggaactgcaccacgcggcagcctcactgggttccataaggaagtggctattattcctgaaccagcggttgacggtaaattgataggttaacgttgagccattgcctgtatgttcggccgtaatggtgacccgattattagccgatgtaggttcttgattaaacctcacattaccgctgccatccacgctggcccaactctgatcgctactccagctataggaactgttcccggcaggatcctcgccaaccaccaactgaaattccgcaccggtaaatcctgttttagggaagccatcatcagccgagaaagaggcgccgttggccaagatatgtgtcatctgcacatcatcaaaaaacgcaacgttgacggtagcagaaacaccgttagcagtggtggccgtgacgtcactattgacagccgtgtcactggtcagggctattttcacctcaccgttgctgtccgtaacgccactggtcgccagcagcgttacgccgttggtcgcagtgaagtttaccgtttcaccctcaatactgttgccatggcggtcttcgacataaaccaccacattattatcgtcaatgccgttggccagcgcattgtcctgggtgacttccgcatgcacaacctccactgggccggcaacaaacagcgtattgaccgtctgagcatcatcatcaatcctggccgttacctgagtggtacctgcaatcacattcgtcacatacgccgttgcctcgccctcaactccagtttgcgcactggccgaaatcgcgcccatattatcggcatcgaaaagcaccgttgcgcccacaacaggtgtaccgtccagatactgaacggtagcatgtacggtattcaccgccagcccatcggcaaccgctcccaggggagactcggcccataccaggctggaaagcatccgctgccacttgatattgatagggttaggtagctgaaccggcagcccctcacttggaatggtaatatcgggattggtttgaggggttacgatcacgttcaacgcactgcccgccaggatgttactgagctccagagtataactggggctggttgccccattaatggcagcaccgtccaacgtccactggtaggtcgttccctgttccgcatcaccatccacatcattgaaggaggatgtcacggtaatcacctccccggcccgcggcttgaggttgtctaccgagagcgtggtggtcggtggccgtccgtggactggctgggtagattgctggacagcctgcaccacctggctcatcacgacgatcagaaccagtaatatcctgaatacaaaaaccttaaagagattattgcgatgcaacatccagcgtatccatcatactgatttgttaaatcaactggcccaggcacgcctgaagcatgcctgggctgactctttattactgagccgcagagttgctgacaactacctgaactctcagtctctggtctgtacgcactggagtataggtgctgctggttgccccgcttatgttgctgtaagtatttgtgccctggccagtttcaagctgccactggtaggtcacgccggtacaggtcccccccgcacaggttgctgtcgcagtcagagtagaatcaacctgtggatagccaccaacttcaccagtcaccgtcacgccggtgactgtcccccccgcaataacggtcaaggcattggaggcaacggctataccagaagccgggtcggtaatggcagggtcggtatgcggagtgactaacacggtaatggttttgcccagatctccggcaacaatggtgtaggtattgccagtagctcccgcaatatctgcaccattagcctgccattgataggtttccggtatcgccgtatcaccatccgcgtcgctgaacgccccagcggtaccgatactcaaggtatcgccgatatcgatcaagccgttaccactggcattgtcggaaacaatggtactctgcgtcactaccggggcgcgccccctgacggtggaagtcgggctggaggtcactgcagaccaggcagaaccgactatcagcatgctgagtaacatccccgctagcagggacaccagccctctgcgtgagccaatcttgttgtccattgtttctttcctctgctgtactcaaaatcaatgtttgaatcaccttccaggccagcctggaataatgataaaaccccggtcttaatgcgataccactcgaatagcccgtttctgtaagtttgccgtcaccgtcaatgtttcagaggttgcaccaggaattgcgacaaagacccccgaacctgcagatgactcgacttcccactgataattcattggtattccgttacacaaagcaattgaacacattgcaacggccaggaggttatccccaacgacaggatgcccagtcagctcggtgccgttgctgtatatcaacaatttgaccggtgtttctggcacaaaagagagctctgtactggccagatgatcaccgatgatggcggtcaccgtggtgactccggcattaacattggctagcttcaccgtcacctgcccctcattatctgtcctggccgcaggggacaggaccgtcgcaccattgtctacctcaaactccactgcagtagcattgataggattgccatggctatcggttacccttgcttcaaccttattaacatcaacgccattagcgtatgcatgatcgctaatcaccatcagctcaatggtcgcagtaccgcgatcggcggtgagcaccacgtcgtgcgacttcatctccacggcggcaccatttactgtaggaactacggttaccgtgcctgcgactgttccactcagtttgccgctgtacacgccgttattttccgttaccgcgctcagcgtaacctcgggaatacccgtaacctcaaaggccaccgttaaccctttaataggctggtgattgatatcctgggcagtaaagtccaacgtactggtctgtaaaccatcagcaataatttctgccggttctacgctaaaaagggagttttccgggctcagtacctgactactcgcgattaaattaactttagctgaagccagagagatatcattaatggttggagcaataatagcttctccctgggagaaccctgccgttaactgataggtgtagacccccggtgcggtctcggtaacggcactcaacagcgggttactgataggctgagctgcccccgtattcggtgtaaaatgcaaatccgcagtcagttggtctcccattcccttaaccggcaagttgttaacatcttttaaattcaatgtaatcaagctcttggcaacgccatcagcaggtatttcggccggggaagcctgaatgctggaattgaccgtgctgacattttgttgtgtcacaacgatctgtgtggtactgcggtttgaggcattgccctgattatcgtaagccacggcacctaacgtgtagttattattgcctaccctataagggggtaattttatcgaaatgctttgtgaagaggtttgtataaccatccccccggctgccaccaacgatgcgctatcccaatcgattcgttcaagcccatatttcgccgtcacctgtgcatccactttgatcgtttcaaaggcacttccggtcatttgatccggcaatgccaattggattaacgtctgtttctggtactccagcacaatctggttattacgttccaccagatcataacggctacctgccagcgtacggcttgctgccaccgcagagggatctatttgcgactgccatgattcgcccaaacggtagttcagttgcacactgatgttgctatcgttacggctacctttgccagcacggtgctctgctccgatagtgatcagggggatcggcgtatagttgatccccgcagtgatcgcataaggatttttctgccggtcatccttaccaaacaatgccacttcgtcaccccggtactgctcaaacatcaactttccacccaactgaggataagcgggcaaatacgcttctgcccgcaggtcataaccgttggcaggacgttcattgtaatcagcaaaatcccgggattgatgccaatcggtgagagccagatagctgttagccgatagcttcaggtaatccgtccaggcttcaaccccaaagccgacgcggtcgttcttaccggtcatgtcacgatcaaaaaaggcgttaacaccatacatccaattatgttgcacagtccgaacacccgccccgagattgacggtgttgcggctgtcttggtttctaagtcctaactggctgaataaaagcgattttttgttatcataaagcggtaccagcaggtcaaccgagctcccttccaggctgaagtcatcattaagattaagttgaacgcgcgcagtcccatacgagctcagccaatgttgtgccgaatcattgaattcacccaccaccatcgaacgcgccatgccagccgctgccaacggggtgttatcagcagctaacagtgtggtcccctttaacaggccatgtgccagcctctcattatgttgaggagggggtaccgctggggaagcttctgtttgctggttttttacgctcaatgaggctgcggtcgggatatcaatttcatcgccgctccccagttgattgaacggttttgaaaatgagcgaaactgattagccctttttagctcctccagcgtaatatgctgttttttagccacactatagacggtttcacccacccccaaggtgtatggctcggtttcatacagcgtaacaggcttggttagtggagcgggggcaagcatttttgctattactgggacaaaggaaaggctcaacggcaataacagttgaaaggtaacattaacccacacaacaagaggtttgaatgccacggaggaaaactccaacgggatatctgttagagtagtcgggctttaattctttcacaaataggaggaggcattgaactacaccgtgctgacttcaagcggatgcacgctcccgtcatcaacggttgttgaaccagtctagcgtggctaactctgctggctacggtaaagcattttgcccattattgtcctccccatctgcggtactccgcgtgaccaaagcctggatccaacatcacgcaatcgtataagctgtaacagtaccctctgcatccgcgatagggccaccgataaagcccaagcggatgctcgcatagcctcaagcgaaccaaccgatctatgctcatcttatcttgatgttttataaggagtattatcatatgattgatctgtattacgcaccgactcccaatgggcacaaaattaccctgcttttggaggaggttggtttaccttatcgtatccatcgcgtaaatatcagtgctggcgatcaattcacaccagcgtttttagccatttctcccaacaacaaaatcccggcaatcgtcgatcaacaacccgttgacggtggggctcccatcagcctgtttgaatcgggtgagatcctgctctatctggcagagaaaaccggcaagctgctcagcaaaggggttcgcgaacgggcagcaacgctacagtggttattttggcaggtcgctggatttgggccgatgcttgggcaaaatcatcacttcaaccactatgccccccaacctgtcccctacgcgatagaacgctaccagcaggaaaccaaacgcctgtatggcgtactggaaaccgagttgcaacggcacccttacctgggcggcgacaactacagcattgccgatattgcgacttatccctgggttgtgtctcatccgcgccagcgcatcgatctggcggattatccggcggtgcgcaactggtttgaacgcatccgtaaccgcccggcaacggaacgtgcctataaattggcagatcaagcctaacgcggccctcccccctctcttacatcgtgtactcatcggagaggggaaaccggtgtgatctcccccgcgttgctctctttaagcgtctggctacattatcttttcttcactttccgtgtattctgagtacaaacaatcagacctccggagaatctctgatgccatgccagcaacccgatgccattatccgtattaaaaacctgcggttacgcaccttcatcggtatcaaggaagaagaaatcaacaaccgtcaggatgttctgatcaacgtggcgatccactacccggcggacaaggcgcgtaatagcgaagacattagcgacgccctcaactatcgcaccatcaccaaggcgatcattcgccatattgaagacaatcgcttcgcgctgttggaaaaattaactcaggatgtgctcgacatagtgaaacaacatccatgggtaacctatgctgaagtagagatagataaattgctggccctacgttatgccgactcggtttccatgaccatgagttaccgacgagaaaccgcttagcactcacccctaccagggaggccgaccatgaagatcctgattaccggcgcaactgggttgatcggcagtagcctgaccaggcaactgctgcacctttcgcatgagctcaccctgttgacgcgcaacgtcgccaaagcacgggataagttcggcgatcggctcagctactgggcttcgcttgatgaacaacgctctctggacggttttgatgctgtgatcaacctggcgggtgagccaattgcggacaagcgctggagcaaggcgcagaaagaactgctgtgccgcagccgttgggatttgaccgaacgattagctacgctgatcgccgccagcaataccccaccttcggtactgatttcgggctcggcggtcggttattacggcgatcagggccaggcggtggtagcggaagaagaacctccgcacgatgaatttacccaccagctgtgccaacgctgggaagctttggcccttcgggcacaaagtagctacacacgcgtctgcctgctgcgtaccggcgttgtcttgtcgcccaaagggggagcactggcgaaaatgctaccgccattccgtatgggcttaggcgggccgatcggcaatggccgccagtatctgccctggatccatatctacgatatggtcaatgccatcatttacctgttggacaatcctccgctgcgtgggcccttcaatatggtggcaccttatccagtgcataacgaacagttcaccgccaccctggccaaggtgctggatcgcccggcgtttcttcgtgcgcccgcctttgccatgcgcttactgatgggtgaagcggcggtgttggtattaggtgggcaacgggcggtgccgaggaggttggaagaggcggggtttgttttccgtttctttgagctggagcaggcgctggatgatgtgatcaatcagcaggcttgatgacctctcccacagggagagggcgctgtcagcccctgctttgttggaagtaaagaggtcatcacagcatactcgatcgaccccttatccaaaatacatctcccttttgacacctcttttgtagagggaaaatttatcaccctaagttggtgcccaagatcattaagccaaatcaatcacggcattttcagcccactcgatcggtcccctctccctgtgggagagggttagggtgaggggcaaaatatctacttcagcgctccggaaaggaactgctgcaaacgtgtgctcttagggttaccaaacaactccgcaggcggcccctgctcttcaatcagcccctgatgcaggaaaatgacgtggctggagacatggcgcgcaaactccatttcgtgcgtcaccaccaccatggttttcccctcttccgccaatttctgcataatgcgcagcacttcgcccaccagttcaggatccagcgccgaagtcggttcgtcgaacagcagcacttccggctccattgccaacgcccgggcaatagaaacccgttgctgttgcccaccggagaggtgaaccgggtatttgatttgtgcccgcgcatcaatgccgaccttatccagatagcgcaccgcccgttcccgcgcctcggccttgctcagccccagtacctggattggagcttccatcacgttctccagcaccgtcatgtggctccacaggttgaaatgctggaacaccatcgtcaggcgggtacgcagcagctgcagctgtttcttgtcaaagactctaagctggccatccttgtcgcgcaccatgcgaatattttcattattcaggctgatggtgccttcgctgggcttctccaggaagttgatgcaacgcagaaaggtacttttaccggagccggaagaaccgataatgctaatcacatcgcccgcattggccgccagggagacccctttcagtacttcatggtcaccataacgcttgtgcagttcggtgacggctaatttttgttcaggcatggtggatccccgtcattcatcgatgagttacgtgcgccatccagcgtttttctgccctgcggaacaggctgatcaacgtgtaggagataatcagatacagcacggccgcaatgccaaaggcataaaacggctggtaggtcgccgcgttgatatcacgggctaccttcaacaggtccggcaccgtggcggtaaaggccagcgcggtcgaatgcagcatcagaataacttcattgctgtacgccggtagtgccgagcgcagcgccgaaggcaaaataatgcaacgatacagcttaaagctggaaaacccataggccctggccgcttcaatttctccgtgcggcaccgaacgaatggccccggcgaaaatctccgtggtataggcacaggtattcagcgttagtgccaaaatggtgcagtttaatccgctgcggaaaaacgcattgagcagttcggtgccccgcacgatttccaggctgtacataccggaataaaacaccagcaattgtacgtacagcggcgtaccgcggaaaacataggtatacagccataccggataacgcacccaacgggtggaagaaacccgagctaccgccatcgggatagccagcagcccgcccatgaccaccgaggagatcagcagccacagcgtcaccgccacaccggtataacgatagccatcggtccacagcagttgctgccaatactgatgcaggatatcgatcatagttcggcccttttgacgcctaatgaataacgccgctcaagccacagcaacacgccgttggaaatcgtggtgaataacagatacaccaagcctgcgacaatggcatagaagaaaggctgataggtgccctttcctgccagctgcgtggcctttaccagatcgttgagtccaagaatggagaccaaggccgtcgccttgaggatcacctgccagttattaccgatgccgggtaacgcaaagcgcatcatggccgggaacagaatgcgacggaaaatctgcgcgttggaaaaaccgaaggcggtagccgcctcgatctgaccacgaggcaccgccaggtaggctccccggaaggtttcggtaaaataggctccgtagataaagcccagggtaataatgcccgcccccagcggatcgatatcaatctgtgagaagccaaaaaactccgtcacgctgttgagggcaatttgcagaccgtagaaaatcaacagcatcaacaccaggtccggcacgccacggatcaaggtggtataggcaccaaagatcgtggaaataacagggttttgcgaaagtttaccgccagcgccgatcaaaccaatcaccaccgccagcaatacggagctgagggccagctccagcgtcaccagagccccctcaaatatcagttgggagtaaccttgtagcatttacgtcaccctgtcgtcattgagcacgtcatgacactccagccagaacaggcccggagaaccgggcctgttgccatagagagtacccgacaggaattagccgccgtaaacgtcaaagtcgaagtattttttcgcgaacttatcgtaggtgccgtctttgcgcatttcggcaaaggctttgtctaacgccgctttcagctcggtttcatccttgcgcaggcccataccggtgccgacaccaaagaatttatcgtccttcaccgactcaccggcaaacgcgtactccttgcctggaggctgtttcaggaaaccttcgctcgctgcgacttcatcctgaaacgctgcgtcaatacgcccggaagccagatccgcgtacaccagatcctgattctggtaaggcaccacggtcacgccttttggctgccaattggcgttagcaaaggcttcctgggtggtaccctgcaatacgccgatgcttttgcccttcagcgcatcgacggttggcaggatcttggagcctttgggtgcgatcaggcgtgagttggccgcaaacagcttgtcggtaaaggcaatttcctgctggcgtttttcggtaatggacagagaagagatgattgcgtcgattttcttcgctttcagggaggggatcagcgcatcaaaatcgctttccacaaagatacacttggtatttatgcgtttgcacagctcggtggccagatcgatatcgaagccaaccagttgaccctgcgcatttttcgactcaaacggcgcataagtgggatcggtaccgattttcagcgtggaaggtaatgcggcgaatgcactgctaaccgcgctcaaagccaaaactaaagggagaactttaacaagctttttcataattaccctcaaatggatatttttgccgatgccactacgggcattactttcatcacacacaggatctgcagtaatcatgccactttgtcattagcgagcgcggggaacggccacgctctgttcaaagctcttcccagagacaatcaacgacaaaatgaacggcaaactcgggcttcgccacggaaaaccagcaagatactgaaacagagtgcatggggaagcaggatcattatgatgcatcaatcgcactaaatcagtgcgatgttgcacaaatgtataaatttgagggtgagttagttaattaacgccttgccaacgcgtgaagagatcttgcggcagttcgatgtcaaactggtcgatgacccgattaacggtctgatcgataatatcgtcaacggtttgcggacgatggtagaaagccggtaccggcggcataatcaccgcccccatctccgctgcctgggtcatcagccgcagatggcctaggtgcaacggcgtttcgcgcacgcagagcaccagtggccgacgctctttgagcaccacatcggcggcgcgagtcaacaacccatcgctgtaactgttgacgatgccagataacgttttgattgagcatggcaaaatcaccatccccatggttttgaacgatccggaggaaatactggcggcaatatcacgcgcatcgtgcaccacatcggccaaggcctgaacgtcacgcaggctcagagaagtttccagggccagcgtctggcgtgccgcgttgctcattaccaggtgggtttccacctcttctaccccacgcagcacctgcaataagcgcacgccgtagatagcgccgctggcgccggaaataccgataatgagtcttttcatcaagctggcctttgtcgggaaatatgccgtaaggatagccgaataggggcaggtttggcagcaaccttcgtagattcgaggtgggaataagacaatgcaccgtaaccaacgctacggtgcaccgttttggtgaagcacgcgggcgcgttagccctcgttatgcatttccagattttctgcttctgtctggccgcgcaacgctttggcatcgtcattacgcagcgtttccagatactccagatagctctggtcaacgtctttggtcacgtagatgccgttaaacaccgagcattcgaactgggcgatgtccgggttctcttcgcgtactgcggcgatcaggtcatccagatcctggaaaatcaggccgtcggcaccaataatctggcggatttcgtccacttcacgcccatgggcaatcaactccgtggcgctcggcatatcgataccgtacacgttagggaagcggatctccggggcggcagaagccagataaacccgtttggcaccggcgtcacgcgccatctccacaatctgctctgaagtggtaccacggacgatggagtcatcaaccagcagcacgttcttatcgcggaattcggcacgattggcgttcagcttgcggcgtaccgacttacgacgagcctgctggcccggcatgatgaaagtacggccaacatagcggtttttgacgaagccctggcgatacggcttatccagaatacgggcaatttccagcgcgatatcgcaagaggtttccgggatcgggatcaccacgtcgatatccagatcttcccattcgcgcgcaatcttctcacccaatttctgccccatacgcacgcgggcgctgtagacggagatcttgtccataaaggagtcaggacgggcaaaatagacatactcgaacaggcaaggattggtttttgggttctccgcgcactggcgagtgaacagctggcctttttcggtgatatacaccgcttcgcccggcgccacatcgcgcaggaagtcgaagcccaaggtatccagcgccacgctctcagaggccaccatgtactcacagcggccatcttccagctcacgtttgccgatcaccagcgggcgaatgccgttgggatcgcggaacgccaccagaccgtggccgataatcatggccacgcaggcataagcgccacgcagttgctgatgcatcgcggcaacggcggtaaaaatgttgtcggactccagtggataatgcgggaaacggtcaagctcggtggccagcacgttcagcaggatctcggaatcggaagtggtgttgacatgacgacggccacgttcaaacagctgttggcgcagttcgtgggcgttggtcaggttgccgttgtgtgccagcgtaatgccgaacggcgagttgacatagaaaggttgagcttctgaagcgctggagctgccagccgttgggtaacgtacatggccaatgcccatgttgccctgcaggcgcagcatatggcgggcttcaaaaacatctttcaccagaccatttgccttgcgcaggcggaacccattatgggcatcaatagtgacgatgccagcggcatcctgtccacgatgctggagcaccatcaatgcatcataaatcgactggtttaccggcataaaaccggcgataccgacaataccgcacatgttgtcttttcctctaagccgctaccgccccggtaattgggttggtaagaaactcgacgtgctttgcagatagtcaaagaaccatctgatgatgtaactgaactgggggatcaactgtgactgtttccagtccgcactttgcgacagggtggtaaaggtatccaggaagaacagtatcgctgctacgatcaacacgccgcgcagtgcgccgaaacacacgcccagcacccgatcggtgcccgataatccggttttctctaccagtgacccaatcacatagttaacgatagcgcccacaatcagcgttgcaataaacaaaatggcaatcgcaatgccgttacgtaccagctcatcttcaaaacgggtgaagtaggctgcaaggtatgggtagaaatggctggcaacaaagaacgcacatccccatgtcacaagtgacaatgcttcgcgaacaaaacctcggatcaggctcaccagagccgaaaatccaatcaacgctataatgacgtaatcaatccagaccatgaactattccaatgatgaatcgcccctgcatccaatcgcggcgaattctaacagaaaaagaaaacgtttgcgtagcggatttcccaccacgtaacaaataaaaaacggcgatgttaccctatggatttcaagctgcagctagtcgacaagctatctcatcctcaggagcttacgtttagtaagtgcctggggtgagatatcgcaggtaacaacgctgcagcttgaaagacgacgggtattaaaattgctaatcgccgcgcctacttaggtcatcaggcctgtgaaaggcacatttttagtggtgatttggcaatcctcctccttgagcacagtggcccctcaccctaaccctctcccacagggagaggggatcgtccgagtcgctgttagctgctgtgacacaattccaacttccccgaaccttggattaagtgagcaagagtattagaacccctgcccctctaagcacagtgcctgagggaacgctccctctccctgtgggagagggtcggggtgaggggcatacggcagacccaatggatcaacgcgcgctatacgccttcacctgcccgcttaacccactgatcccattcagctccgccagcgaagcctgcagtttttgcttcgaggcatctgggccaacgtagatgcgggtgatttccccctgcaccggcgtggagggcacggtataagccctgtgcccagacaggcgcagcgaagcgacgatctcattgaccttggcagcattcttcaacgcccccaactgcaccacataagcctggccagccggtgccttttcttcaaccgcaggtttggtttcaggcttcggctctggtttgacttccggttttggctctacctttggcggtgttggcaccggcttaggtttcacttccactggcttcacctctaccggtttaggttccacaggcttaggtttcgttggctgaaccggtttggtttcgataggtggcggagcaacaaccgcaggctgctgcggcgattgagtcgtttgattagccgcctgctgggcggaagcctcggcggcggcctgctgttgttcaaccaaagcaccagccccttcaggcggcactgaaggtagcgcctgattggccggtgggatcacgtcgatttcatgagcatccccaggcttgggcaccaacgggatcgccgcaaactcatcctcataatgcttctttttgccgtcaagcagccccggcaggacaatcacccccagggcaaccaaaatcacggttccgaccagtcgattctgaaatttacttgccactcacactccccgcctctcgtctaacgccgccatcacgtgggcaacagtgtggaaagacccacagacgatcacaatatcctgaatatccgcgtcctgcatagcctgacgccaggcagtttcgacatcggcaaacttgcgtggttccgttaaatactgtgccagcagctcaacgctggctccgcgcgggccttccagcggcgcacaataccactcgtccacctgctcgctcaggcaggccagcgtaccggcaatatccttgtctgacagcatccccaccaccgcgcgtactacaccgccattgcggggaagtttcgccagtcgcccagccagataggccgcagcatgagggttgtgggcaacgtccaggatcagctgcgggttctgctgcacggtctgaaaacgccctggcaaagcggcctgctgtagaccggcaaaaatcgccttctcgtcgatttccagcgctgaatagtgcagcgcagccaatgccgtcgccgcattggccaaggggacgttaggcatagggagatcggtcaggcgtgtgccgcccccttcccattgccagcgttcgccctgttcattgaacgaccaggcttcatcacggcggtacagttgagcgttgagatcttccgctacctgctggatgctatgtggcatatccggctcaccgaccacggcaggtttgccgccacggaaaatccccgccttctcgcggccgatgctttcacgatcgtggcctagccagtcggtgtgatccagcgcaatgctggtcaccacggcgacgcttggctcgacgatattggtcgcgtccagacgcccacctagccccacttccaggatcaccacgtcaagcttagcctgtttaaacagctgcaatgccgacagggtgccaaattcgaaataggtcagcgaggtttcccccctgccagcttcaatcgcggcaaaagagcggctgtgttcagcctcactcagctcttcaccctgaatgcgaacccgttcggtgtaacgcaccagatgcggtgaactgtaaaccccgacccgcagcccggcagccagcaaaatggcctctaacgtgcggcaggtggtgcctttgccgttagtaccggcaacggtaaatacggtaggagcaggagtgagaaggtcgaggtgcgccgcaacgtgttgcacacgctccaggccgagttcgatcgcctggctatgcagacgttccagatagtaaagccacgagctcaatggcgacgtggcttggggaatttggtggttttgcatgagtcccatcactgactttgggttcataaatccgtaagacgcatcgccctgacgacgtcaaaagcgatgctcttcgtttcccgccgcaacttagccacaaaatggcggcggaacccggcgcaggcttgcacctataccgggtctttgtctgctcctcaggcgtcggcctgattttcctgagcgatgaccggcgccgcctcatcgaaatgcggctgcggctgattagtcagcttggaaagaatgctggccagggtctgacgcatcaccgggcggcgcacgatcatgtcgatagcgcccttttcaatcaggaactcgctgcgctggaagcccggcggcagtttttcacgtacggtttgttcgataacccgtggcccggcaaagccgatcagcgcttttggctcggcaatgttgatatcgcccagcatcgccaagctggcggatacgccacccatggttggatcggtcagtaccgaaatatacggcaggccacgctcttgcagcttggccaacgcggcgctggttttcgccatctgcatcagcgacatcagcgcttcctgcatacgcgcaccgccactggcagagaagcacaccagcgggcagttatcttccaacgcctgctcaaccgcacgcacaaagcgcgcaccgaccacggaagacatcgaaccaccgataaaggcgaattcgaaggaggccgcgacgatcggcatgccatacagcgtgcccttcatcaccaccagcgcgtctttctcgccggttgctttctgtgcggcaaccagacgatctttgtactttttggaatccttgaacttcagaacgtctttcggctccagttcgctgcccagttccacttcactgccttcatccagcaaggtatgcagacgcatacgggctgacatgcgcatgtggtggtcgcacttggggcagacctcaaggttacgctccagttcggcacggtaaagaacctgaccacagctatcgcatttggtccagaccccttcaggaatgctcaccttacgggtttgcgtaacattgcttttgttgagaattcgttcaatccagctcatcgatgacctttctgtttgaacctggcagaccctagtccgctgttcatgccttaacaatcctcccggaacacacccaatgcaaaaatgccgagctcagcgcaacaggtgcgctaccaaggcattggcttcagggtcgttcgcgagaacagaccataaatgtcgctcattaaaccatatcggcccgattgtgtggacaaaaaactggtcgaaccgacaggttaagcggtgtttttactgtttttgttggcgggcagccgctcgtttatggcgccagatttcaataatgcccggcagaattgaaaccaggatgatgccaacaatcaacaacttcaagttttcctgcacgatcggcaagtcgccaaacaggtagccagcataagtgaacagcagcacccaaagtagcgcaccaatcacgttataggcagcaaagtggcgataggacatatgccccataccggccacgaacggcgcaaaagtgcgcacgatcggcacaaatcgcgccagaataatggttttcccgccgtgtttctcgtagaactggtgggttttgtccagatagctacgacggaaaattttcgagttcgggttgctgaacagcttttcgccgaacagccgaccaatagtgtagttgacggcatcgccaatcaccgctgcaatcaccatcaatgccaccatggtatgcacgttgagatcgttcgaaggtaacgcggccagcgcaccagcgacaaacagcagagaatcccccggcaggaacggcgtaaccaccagcccggtttcacaaaacaggatcaggaacagaataccgtaaacccacataccgtattgcgcgaccagttctgccaggtgcacatcaatatgcaaaataaaatcaatcagaaacttgatgatgtccataaactctctcaattgaccaggtgtctctctcacccggcgttggcaccagtaaataacgtattaatctgccagcctgccagttaatcgtcggctaaaaacagcggccccatcggcggccggggtaaggcaaacgactctggataatcaaccgcaaccaggtacagtccttcggcccgtgcggtagcggccgccaggctgcgatctttgagcgccaacagttcgcccatccagttctcatcctgattgccacagccaatctccatcaggctgccaacaatgttgcgcaccatatgatggacaaaggcgttggcctttatatctaccacgatatattcgccatagcgcgaaaccttaacgtgttttacgtttcgccacggcgtgcgtgactggcattgcaccgcccggaaggaggtaaagtcgttttcccccagcagggcctgtgcggcacgatgcatgcgatcggcgtccagcggatgataaaagtgcgtcaccccttgctgcaagaccgccgggcgatagcggtgattataaataatgtagcgataacgccgcgcggtggcgctgaagcgagcatgaaaatcgctgctgacctctttcacccagcgtaccgcgatatccggtggcaaatggctgttcacccccatcgtccaagcggcgtctttgcgcagtgcggcggtttcgaaatgcaccacctgcccagtggcatgcactccggcatcggttcgcccggcgcagaatacgccgatcggcgcatccgccaccttgcttaacgctttttccaggcaagcctggacgctggtaacctcttgctgacgctgccaaccgtaataacggctgccgtcatactcgatccccagcgcaattttcagcattggctgggttggcaactccacctcggacatcagtacatctgctcctgcaacagccgttcagcggtttcgatcgccatcaacgcgccgccaaagcgcacgttatcggccaccgaccagaactgtagcatctcggggataccataatcattgcgcagacagccaatactcagcatatcgctgccggaagcttcggtaacctgagttggatagtcgtcttcttcgctcagttggatatcttcagcttgctccagctcgtggcgagcttcttctgccgcgattgggcgcagcgcttccagatgcaccacttgtgcgtggccgtagaacaccggcgactgaacgcagctcaccgaaatcggcagcccttcatcctgcaacactttacgcacctgatcgacgatcagacgctcttcacgcacgctgccctgctcatcggtcatcaatggcagcaggttaaacgccaactgcttggcgaacacgcccggctctgcggggatgccgttcagcagacgcgcactctggcctgccagatcgtccaccgcgaccttgccgcgagccgaaaccgacatcaacgtagtgacgtgcaagcgggaaagcccggcctgttcggtcagcggcttaatcgccgtcaacagctggctcaccatgctgtcggccactgccacgatattgcggttgcgataatccgccagcacctgcgggttaacgccaggcaccaccaacggcacgtccggctccaaggcaaaatagccgctggtgtcgatcaccagacagcccatgttgcccgcatcatcggcgtaacgggccgcagcttcgctaccggcaacaaaaaacgccagttgcgcctgcgaccagtcgaattcttctacattttccaccagcaaggatttgccgttgaaacgcaccgtcgcaccagcactgcgctcgctggctaaaggaaagagttcacccaccgggaactggcgttcctgtagcaattccagcaacgcttcacctactgcgccagtggcaccgagcacagcgatattccagccgtcagacattgggtttctccagagtatttgattcaaatgcaaacgggcgatgcactcaccgcccgataaactttaccgccaattgccttaaggcaaccttatgctcgccctgttacagaacgccgaagcccagtttgtgcagtagttctgcactcgcactgtcatcacactgcacccgcagtgaagaccactctcggcgttcctgataatgcttgcgtagtcgatcgaactcacccggcagcccggcaacttgccgcagcggcgcatcatcgcggcgcacatcatacaccaagtgcatcaatcgttttaacttgccttcgtccagcggcccattgagacggatttcgctgaactctggcaccggcagcagcgaggccagctcaatagattgcggctgcccaagatgctgagcaaaggcttcaaacacctgtgtggtgccgcgtgctttaccttccagcgtgtaaccggcgatatgggcggtgccgatatccacgagatccaacaacggcacgctgagatccggctccggctcccacacgtccagtaccgtactcaatcgcttaccccgctccaacacgttaagcaacgcggcgttatgtaccacggcaccccggcaggcgttgatcagaatgcgatcgtcgggcaaggcatccagcagatccgcgttggccagatgcaacgatttatacgggccagtcttgttcaacggagtatggaacgtcagcacgtcggcctctgccaccagcttttccaacggccagaattcgccgctgtctccacgatcggcgcgcggtggatcgcacagcagcgtacgcacgcccaaggctttcagacgagcgtccagccgagagccaacgttacccacccccacgatcccaacggttttatcacgcaaagagaaaccatcgcgctccgccaacagcattaatgacgaaagcacatactccaccaccgcaatggcattacaaccaggcgcggccgagaaaccaattcctgcctgctgcaaccacgcctcatccacatggtcggtccccgccgtcgcggtgccaacaaaaccgatcttggtgccagccaacagctcctgattcactttggtcaccgagcgcaccatcaaggcgtcggctccggccagcgcatcggttgggatcgggcggccaggcacggcctgcacttcccccaagcggctaaacaaatccaccgcgtagggcatattttcatcaaccagtatcttcacgtcactctccaaagatctacccgtgcctttcaagctacagcttgaaattcatagggcataggtaagcagtagctacaaaatagtgtgccaccgaatggcttggaaacccaagcttgttatgcccggtgaaataacgatgattttcttctaagctttattgagttttttccgataattatcacgcaaggaggcgaaccttcgcgttagcgaccggctaacgggcagaaacaaatcgaaaatcaagggcgttaaccatgaaaaaagcgacacttgttctggcgatcgtggcaacactcacagccgttggtaccgctcaggctgaaaacgtgacttcacaagcattggccacctggcctgcgatagcggtgaaagactccgccagccaattggtcgttacgcccattggcagcctgtatttccaatatgctgaaggcgtcaagcgcttcaacagccagcaaggcgtgttcgacgtggctctcgaaggcgaaggcaccgcgattaaactgaccgccaaactggtttccaataccctgactcagttgggcacctccggctctaccctggaagtgggggttaaacaccacggcgctgcgataacaaaaaccgctcaaaccaccctgattgatacttctgccggtatgtcaggcggtaacctgagtaaacttgccaacgccgacaagcagcttggccgccagggtgcgcaagaccacttcgatttcactatcatcggtgcgacggccgatggcacgaccccagtgaccgacttcagcaccttgccggcagggacctggagtggtgatgtaaacgttcggttcgacgtaacctgggccagttgatgtcgtgttgggattgtcatgcccggcggaaacgttctggcgtggtgccggcgatctgctggaacatcacaataaacgcggaagccgagctgtagcccacatcgagcgccacatcctgcacggttttcccctgttcgagcagtgagagcgcatgtaaaaagcgcaggcgctgccgccactcgctaaacgacatgcccagctcctgctggcaacggcgcgaaagcgtccgttcagtggtatacaccttgctggcccagaccgctaatgaggtgttatccgccgggcaacgttccaacgcctgtaacactggccccaaaaacttgtcttgtgaggtcggcagataggtctgttgaaccggtgaaatccgcagttggtcgatcagcacccgacaaagacgcagatcctcttcgctagtgggctccagcattttgcgccccaggcaatcttcaacaatagcgctgaaaaccggcgagacgttgatcaaacaggcctcttctggcaacccgacgcataaggatttggcgatattgatggtgcggaacagcaccggtttgcggttatggctggaatgctccattcccggcggcaaccagacggcaaactccggcggggccaaaaagcgctgcccggcaatattcagtgcgatcaccccggttttgacgcaaatcagctgcccccagtcgtggctgtgcggcagatattcagtatctgcattggtttcttcgcagcggaaaaacagcgtgcgcggagcagcgacgtctgcggtgggataattacgggtttcggccatggtgaagttgtcttgatttcgcgaaatgctgtctgattttgactatatataataaaccggacacgggtagactagccagcatgttattcgttgttgagaattattatcatgaacgtgctctttcccctgctggcagtgctgatctggtcgattaacgccgtagtcagtaaagtatcggcaaccgccatcgatccggcggccatctccttctatcgctgggcattggcgctgatcgtgctcacccctttcgtactaccaggagcgatccgcaattggccagccattcgcgccaactggtggaaactaatgatcctaggcctgttggggatggtgctctatcaaagcctggcctattacgccgcacatagcgtcagcgcgctgtttatgggcatcctcaactccctgatcccgctgttgacggtgttaattggcatctttgtcctgcgcgttgcccccaccgtgggtatcgcactgggcagcatcctgtcgctgggcgggctggtgtggctggttagcgcggggcaaccggggctgctgctgcaacacggcatcggcaaaggcgagctgatgatgttcgccgcttcggcctcctacgccctgtacggcgtgttgaccaagcgttgggcgatcccgttgcccaactggcagtcgttgtatgcgcagatcgtgtttggcgtggtactgctgttgccaaacttcctgatggcacaggatgtacagcttaccagccagaacatcccactggtgctgtttgccggtatccctgcttcgattgccgcgccgttcctgtggatccaaggggtgatgcgcctgggagctaacaaggcgtcgatctttatgaacctggcaccggtgttcaccgcgataattgcggttctgttcctgcatgaacagttgcatagctaccatctgattggtggcggtgtcgctctgctgggggtgatcttgtcacagcgcctgcgcacgccattagggcgcagaaaaagcaccgtaacaccgtaatcaccggcccctcaccctaacccacaggaggaccgatcgagttcgcttgaaaagtgcagtgatcaatcatgagcattagttgactcatctgggatggagaggcgctcaaatttnnnnnnnnnnnnnnnnnnnnnnnnnnnnnnnnnnnnnnnnnnnnnnnnnnnnnnnnnnnnnnnnnnnnnnnnnnnnnnnnnnnnnnnnnnncccaacagcttaaagcgtatccgtaccaacagaccgcctagcgcgtcagaactcagcagttccgggcgggtgccgtgataagcggtaatatctttaaccaatgccagtcccaacccagccccaggctgatcgcctacgttatccaaacgacgaaacggttgcagcgcagcgaccgtctgatcctgagcaatgcctggcccgctgtcttctatctctaacagtccctgcccatccaccatcaataaacgggcggtcacaatccccttggctggcgtgtatttcagtgcgttatccaacaggttggcgcaaagctccgccaacagcaacgcctcaccgcccacccaacacactcccgctccttcgtagccaagatcgatctgcttgctgcgggcctgcggcagtcgcgaaaaacaggcgtcacgtaacacctgcgctagattaaccggcagcaacttacgctcggcctgatgctcgtgcgccttcagccgcgagaggtatagcaggcgatcggtcaacgcgacggtactgtccagagtggcgctcatcccttccagactctcacgccattgctcgggccgttcgctggccaatgccactcctacctgggttttcaaaaccgtgagcggcgtacgtagctggtgggaggcatcggcactaaaacgttcctgacgcgccaccatcaatcgcaaccgctcaatataacggttgaatgccagcagcagcggctgcatttccgaccagggcaacaccatcggcaaaggcgtcagctcccccggttcgcgccgcagcatcatgctggacagcttgcgcaacggttgcagcagctttttcaacaggatgtaagccagaatgagcgtcaataccaccactgtcccctggctgagcagcgccgccagcagcatctgccgtgccagatagcgccgcgactccagcgtttccgccaccagaatggtcgccatccccataaccccgccctcattcaccggctggaacagcgccgccacgcggattggctgtccccgatagtgcgcatcgtaaaaatgcaccagggccggatagaggttggaacgaggaatatagggcggcatcttgggcaaatcgttatagcccgaaatattccgcccctcaggggatatcacctgatagtacagccggtcgttcatattgcgctcgaagctgtccagcaccacataaggcacatccacctccaggcgctgattgcgcaccaccagcctctccgccaccgtgcgtgccgatgccaataaggtgcgatcgtaggccagcgtcgccgcactcatcgcgctgaaatagtgggtgtaaattgagatcccacccaatgccagcaacggcaaaccaaagaacagcagcaactgatagaacaacgaacgcggtgctttaaaccacctcatcgcacagctccaggctgtagcccagaccccgcaacgtcacgatcgccacgttgctcccctggagttttttacgtacgcgatgaacgtaaagttcgatgctttcgggattagcctcgtcagagagcgtaaacacctgctcaaacagttgctgcttggcgaccggacggccacggcgatgcatcaaggtggtcagcaccgccagctcacggggagttaacgacaggggtttttctgccagcaagaaatagccctcgtcgtgataggtcagcaaaccgtattgcaatgcctgttgcgtcacaccaacgctgcggcgcagcaacgcccggatgcgagcctctaattcatccagttcaaagggcttggtgaggtagtcgtcagccccaagattcagccctttaacccgatcggccacctcggtacgggccgtcaatagcaatactggcagagtctgcccacgcttacgcagccgcgccaacagatccaggccattgagccggggcagtgcgacatccagtaccaccagcgcatagctctcgtgcaataacagatggtctgccgccacgccgtctatcgcaacatccaccgcaaacccaaggccggtaagggctttctgcaaccaatgagccagttcggggtgatcttccactaacaagagacgcatatcacatcctgtaaactttcccggtcgctgaaaggtaaatgaaaggtttatgttttaacaatttggcaaccccgtgtcagcggggattctcacaaactgaaacaaaaccgatggggaaacgtcatgaaaacaataattacccgtacgcttcccgccacttttctgctgttcgccgccaaccaggcgttcgccgtggaagcgccaaaacgcaccgaatgtatcgccccagccaaacccggcggaggcttcgatctcacctgcaaactgattcaggtctccttgcaagaaaccaaggctatcgataagccgatgcgcgtcacctatatgcccggcggcgtgggagccgttgcctataacgccatcgttgcccagcggccagccgaatttggcaccgtggtagcgttctctggcggttccctgctgaacctgtcgcaaggcaagtttggccgctacaacgtggatgatgttaagtggctggcggcagtgggtaccgattacggcatgatcgccggacgtgccgattcgccttacaagacgctgaaagacttgatgacagccttccaaaaagacccgaacagcgtggtatttggtgctggagcctccattggcagccaggattggatgaaaaccgccctgctggcccgtgaagttggcgtagatccccacaagatgcgctatgtggcgtttgaagggggcggcgagccggtgaccgcgctgctgggtaatcacattcaggcggtgtccggcgatctgagtgagatggtgccttacctgaaaggagacaaactgcgtgtgctggcggtgtatgccgaagagcgcctgccgggagagttggcaagcgtccctactgccaaggagcaggggttcaatctggtgtggccgatcatccgcggtttctatcttggcccaaaggtcagcgaggccgagtatcagtggtggatcgacaccttcaaaaccatgacggcaaccgaggagttcaaacaacagcgcgatctacgcggcctgtttgaattcaacctgaccggcaaagaattggatacctacgtgaaaaatcaggttacccagtatcgtgaacaggccaaagcgttcgggctggccaaataaccggggggattggcatgagcgatcgtatttttgctgctctgtggctaatgctgtgcggcggcggcctgtttctcggttggggcatccagagcgaatacagctacgaacctttggggccacgccccttccctttggccatcctgagcctgatggccctgtgtgccgcattgctgctgttgcgtcggccacagttagtcgagtggccacataaaaacgtgctgcaacgcctgctggtgctggtgatcacgctggtgctgtacgcctggggattcgagtggctcggtttcccactggcaacggctctgctgactttcagcattggcctgctgttccaggccagcatcaaagccgcgttgatttcaggtaccgtaatgggcgtttctctgttctacgcctttgactatttactggatgtcacactgccactcggcgtttggctgagctaacgggagcgataatggaaacctggatgtatttatcacaagggttcgaagtggcgctactgcctcagaacctgatgattgccctgatcggctgcttcgtgggtaccatcgtcgggctgctgccgggccttggcccgatcaacggcgtggcgatcctcttaccactggctttcgctttgaagctgcccgccgagtcggccttgatcctgctggccaccgtgtatatcggctgtgaatacggggggaggatctcttcgatcctgctcaacgtcccgggggatgctgccgcaatcatgaccgcgctggatggctaccctatggcccaacaggtccgtgcaggagttgccctgtcgatctccgctgtcagctcttttaccggctcgctggtcgccattatcggcattattctgttcgccccgatgctggcccgctggtcgctggcgtttggcccagcggaatactttgccctgatggtctttgctattgcctgccttggcagcatgatgagccagaacccgttgaaatccctgttggcggccctgattggtctggggctggccaccgtgggggtggacgccaatactggcgtatatcgtttcaccttcgacagcgtgcacctctccgacggcattcagtttattgtggtggtgatcgggctgttctcggtcagcgagatcttgctgatgctggaaagcaccagcacgggccagaagctgatccgcaaaaccggccgtatgctgtttaaccgtaaagaggctgccgagtgcgttggcccaactctgcgatcctcctttgtcggtttcttcgtcggtattctgcccggtgccggagcgaccattgccagtgcgcttacttatatgacggagaagcgcatcagcggtaacagtgagtcattcggtaaaggggatattcgtggcgtcgccgcgccggaggctgccaataacgcatccgcctgcggttcgtttatcccgatgctgaccctgggcgtaccgggttcaggcactacggcggtcatgatgggagcactgacgctgtataacatcacccctggcccggcaatgttcaccgaacagccggatatcgtttgggggctgatcgccgcgctgctgatcgccaacgtcatgctgttgatcatgaacatcccgttgattggcctgttcacccgcatgctgaccgtgccgctgtggttcctggtaccggcgatcgccgccgtttccgccgttggggtctatgcggtgcacagcacgaccttcgatttgctattaatggtggggctcggcgtgtttggctatatcctgcgcaaaatgcacttcccgatgtcgccgctgatcctgggatttgtgctgggggaaatgctggagcaaaacctgcgccgagcgttgtccatcagcaacgggaactttgacattctgtggagcagtgccattgcccaatgcctgttggtgctggccgtcgcggtgttggtgttacccccactgctgcgcaaactccgcaagcaccgccgtattactgggaaagcgacggaagtcgagtaatgcaaaaagggcgctgcacatgcagcgccccgatgttgtgagccggttgaaaatcgggcgggttaacccgcccgacttattattggcgtataatctcaacagcctgttccaaggccgtaatatcatcgctggccaacaaaggctggatgctggcgaacgcttcggcgggcaaatcgtaaatctgcaacgcgagtaaacgctcgattgtctccgcagagaaccgccgtttaatcatccgggccggattgccgccaacgatagcgtagggctcgacatccgcagtcaccacgctaccggcggcaactatcgccccttcgccaatcgtcacgccaggcatcaacatggcccgcatcccgatccagcagccgtcgccaaggctggtatcacctttaggcaaataagacgcctggatggtttccataaagggatacaggctcagccaatcaatacgatgggtatgattcccgcccatcaggatcaccgcttcggcaccgatacagacataatcgccaatgtgcaacctgtctagcttccccaggggctcccactgttggctgaccgcatcgccgtgcaaatagcgcaccacggaacgttcaaagctgtcatcccagcaatggctgtaataactgtgggttcccttgatcaggatattggggttggttaccgtctggtggagtaattctacttgtgaccagtgtttctcagtcatggcttcttctcttaatttattgcaagagccacggaacgtaatgtcagtggcagcgttttccgttcatcaaacactgccccatcaagcgataagcgctcgttttaaccttggattaatgatcattttctgtttgcaccctgttgtttcgcggccaatggtaacaaactggcgcagaaaaccaagcctacttggcttttctcagcatcaacaccccgcccatcaccaacgcgctacccagtagctgtaactggttcatgttttcccccaacaggaaataggcaatgaccgcggtaaataccagctccagcgacaggatcaggttggccaccgccagcggcagggttttcaggctgatattatacaggccaaaccccagcagcgttggcccggcggccagcgtgagcagcaacagccagccgctccactgaatgccttgaactccctgggacagaaaccacaggtcccccgccataccgtgaaatgccgccaaggggaaaaacgtcagcaaggtgttgaacaaccattggtacacggcggaaaaaccaaatacgtacaggatggtattccacaccgggtaacgccgctcgctggcgatacgcccgccgagggtatacagggtgtaaccaatgccggacagcatgccgaccatcagccccaacagatcaaaacggctgttgcccatgctgtcgccgttgctgaccaggaagcagccgcccaggctgaccacaatcaccaacaactcgcgcaggttgaggcgttcgttgtacatcatccagcccaggaacacggtaaaaccgaccgaacaataggtcaaaatagtcgccaccgaggcgccattgagcgccaccgacagcgtccataagctgttaaacagcgccaacaacaaaccgtagccagcgtagaacggcacctgttcacgacgcagataggcccattgcggtttgaacagcagcaataacggtagcaataccagggccaccagggccgcacgccagaaggccagcacaaacgtcggtagatggtaatactcggtcagcgcgcggatgatgatggcggtgaaggccagcagcatggcactgattatggcgatcacgtaaccctggttggttccccgcaggatcccaccactgaccacaactggttctgctacaacacccgacggtaacgacataacaccctcaaaattccaccgcataatcatctggtggagattttaacgcggccagattttgccaccatagccactttgctacgatgttatgcaggccactttaatcggtgctaagccttgttactctgggatatagtgaaatcagacttatgtgaccgggccaatttcatgcatattccactggatcgtcagcaggacattccgctgtatctacagatcgaagaagcgctgcgccgcgccattcttggcggcacctttgccgatggcgataaattgccgtcaacgcgcagcctggccgccgagctttcggtcagccgcctgacggtggaaagtgcctacgccgaactgacggccaaaggattgttacaacagcggcgtggcagcggcgcctatgtccgccacctgcaaccggcccccatgcagcagcggccagcatccagcgagctattccctgcggatcgtttcaccaccacgacatcgcgtctggacggttatccagatattccgttgccggagcacatcatcaactttgccgctggcgtcggcagccccaaggtgttcccaatggaggcgttccgcaagatcctgatgtcgatcctcagtcgtcatgcggaagaggccttcagctacggtgattattgtggttactacccgctgcgcgacacgctgggccggatcttgacggcgcaaggtatccctacccgtgccgaacaggtgttaatcaccaacggctcgcaacatgccatcagcctgattttccaaactctattacgcccaggggatacggtgattgtcgaagagcccacctatgccgaagctctggggttgctgcacctgcaccagatcaacattgttccagtgcccagcgatcgttacggcatgtgcgttgaacaactaccggagctgatcgcacgacatcagccaaaaatgatctacaccatccccaatttcaataaccccaccgggcgctgtatgagcgaagcccgacgcagccgcttgctggcgttggcgcagcaggccgggatagtgatcctggaggacgactttgttggcgatctacgttacaacggtaaaagcctgccgtcactgcgcgccatggctcccgcaggcacggtgatctatgtcagtaccttctccaaaatgctgctgcccagtatgcgcatcggttatctggtagcggacagcgaacagtatctgcaattctcacggctcaagcatgtcgacagctttaccagttccaacctgatccagcgcgcactggacgcctttgtcaccgttggcagctacgacaagcaactgcgtcgggcgggaaggatataccgccagcaccgtgatgctatggtggctgcattaagcgagcacctgccaccgggctgtcggtttgaaatcccagcgggagggctgtttatctggctggaattgccacctgccgtaagcaccacaacgttgatgccaatagcctggcaacagggtgtcacctttgcccgtggcgaatgcttttatgttgaggagcagcacggtgcacatggtttgcggttgaattttgccgccaatacgccggagttgattaccgaagggatcgcccggctttgccgggcgattgttaaggttatggggaattaaacgctggcccaccagagccgcagtttcatgccccaatagctggtccagccggtggtgctctgcactaccttgccttgagagatcaccacaagggtcggcgtcacgccaatctgccactgcgccgacagcttgccctgctcatcgttaaccaccggcatttgcagcttcttagccgccaaccactgttcaacctgctggtcattgcccgaacgcagcgccacggtcatcacattagcgccgtttgctaccagcttggccacgtaaggcgtggtaaagcgacaaaccccgcaccaactggcccagaaatagaccaacaaaggcttatcctggctgagctgcgccaacgacaccggctctccgtccagggtttccagcatctgttggtcaaaggtcaagggagcctgcggggcccgccaccaatccatggcgaacatcgcccccagcacgagcaacagcaaaatcagcagttcgcgcgcccagcgccgcaacctagccattttttaccttcgccaattgctgcttcactagcgcttccagatcctcataagacaccgcgcccggcagcatctgatcgccaatcaaggtggccggcgttccctgcacgccaaactgttccgccaactgcatattggtgcgcagcgaggtcatactctgctcgctgggagcaaccggcttaacgccagttttctcttgcgctgcggcgatgctggcattgtcatgaaagcctttttttgccatcaggcgctgatgcaacgaccagaactgttcaggatgctgctcccaagccgtcaacgccacccgtgatgaggcgatcgagctttcccctttgaacggcagcagtttcaccaccagcgccacatcgggatatttgttgacgatcttctccaacatcggatcaaactgcttacagtacgggcagttgtaatcggtgaaagccaccagagtcagcttggcattcttgggccccaatcttgggctggcaggatcgtcaaacaggattttgctattttgctcaatcgcctggccgagttgttggccgttggtttgctgctgccaggcgttaaccgcttccgccagaatatccgggttagagaccagcgtttcgcggatcagctctttgatccgcacttcctgctcggcggtgaaaggagccgcagcccagaccggggtgacaatcagcagcattaacatcagtaacttgttcattattggtttcctttggcagtagacagggcttgcagaacggcttcgcgggtgagcagcggtgacagcgcttcgccgtctggcgagccggggccatagatttggttaaagggaacggcaacgctgccgcgctgttgcaggaaggccgagatggtttccgacgggcggctccaatcaccgcgcaacgccaccacatccccggcggtcagtgctttttgcacctcgtcgcgcagcaatacgttgtatttattagccttgcaggttacgcaccagtcggcggtcacgtcgacaaacacccgcttgttgtcggccaacgcctgcacaatcgcctgctcagaaagcggttgccaggcgatgttgtcgtgtaacggctgtcgccactggttggccgtcaacgatcccaccagcaatgccaaaccgcctaccaccagcacgcttgccgccgcgatccccgctgaccgggcacctaaccgttgccacaccgccagcaataagccaagcagcaagatggcaccgacaatcagagtcggcctcacgccgatatggttggtcatcaggctaagcagccagagcgaagacaccagcatcagtagacctagtaccagcctcatcccgttcatccagcggccagggcgcggcaggcgtaacgccaacgttggccatgcggcaatcagcaaccagggcaggctcataccaattcccagagccacaaacataccccaaagcaccggcaacggggccgccaatgcaaaggcgactgccgttcccaggaaaggtgccgagcaaggcgttgccagcagcgtggcaaacgctccttgccagaaatgaccgctcaagccacgcccgttatgagtggccagcttggtattcaacgaggaagagagttgcaggtggaacaggccgaacagattggcgctgaacagcagcgtcaccagcaccataaaaccgataaaccacgggttttggaattggatcccccagcccagcgcgtgattgctcaggcgcaacagcgtcatcaacaaggccagcgccatgaaagacactacgatccccaaggaagaggccagaaattgccaacgcacgctacgccgatcgcgctgttcaacctgcaatatggagcctagcttcatccccagcaccggcagcacacaaggcatcaggttaagaatgaaaccgcccgctaacgccatcaatactgcttgccacagggggaaagctgcggtggagggtaaaacaagcggcccgccaatggtcagcgtagcctcctgagcgatcccagcatcgctgataaccagccgcagctgtttaccgcgcagatccggtgctgcgtctccccagccatcactcacgggaactcgcgcttgcagtttctcgccatcactgctgaccgttggcttgcccaaatcggcccccgccaccgtatcaaagaacagctcaggctgctgccaacccgcactacgttccgcgctaatctgcaactcgccgttgtgataaccggcgcgcaggctgtccaccagcccgctggcaatcggcacctgccccatcgcctgagcaaagtcgtgattgaactgcggaccagccggggtggtgagatccagtttgaacggatagtcagtgaggatacagacattactacaggtggataaggtaagcgttcccgccagttgctgcggcgcagccccctttaacacgatgggcagcgtaacccgctgctgatagccctgcgtcgagatccctgccacgtcaaagcgctgcggcgttggccagaaccaggttgccggtggtgggttgccctgccaggtgatagccggcgcaatgcccccttcccctggtgagcgccagtaggttttccatcctttttccagctcaacagcgagcagcacacgggtttcgtccccgttgctggcgtcggcacgcagcctgacttgcgcatgatcgttctgcgggctttgcagccagccgctatccgctgcctgtgtcgcaggtagccaaagcactaacaggcaagccaacgccagcctgatgatattccacatagttgttctccataaataaattagtcactcggtttgacgagggattaactcattcacggaacacgcataatcgcagatgcaccctgagggtggtgggggaaataactcgtataggagggtacggcaggcgtggagcaatgatcggagccagcaggaccagcaacatccccaggccaaacagcacgttttcaaacatcaccggtggagaagccaacagcgatttggcactcagctcacaaggggtcgtggtggtggcctcttcatcaccgctggccgaggattggctaacgctgacagtgggcaggccaagggccagctgcaaggtatgcaagcccgccatgcgctgggtgaggcacgtcagtaccaccaggcaagccagggttaaaaaccattttgcaatccgctgccgatttatcatcacgccctcaatgccgtatctgcgcctatcttagcggcgcaaataggataagcaacgattggcctgtaaagaaatgtctggcggcggtattgatggcacgaaattacaggtatcataagcgattaagcctgtgcttttcgccgggtatgtcgactctatacactgcgaaggactggtgatatgcaaccattaagtggacctggcgctcctggcgcagccgatcaccctccgaccgctggcattacgccccctgccgacgatcaaccgctctccccggcccaacgcacccagttggaaaaactgatcgtcaaaatcatggccctcagcccagccaaatccgccgagatctgggtcacgctgcgtcatgaattaggggcggataaccacagcgaactgttggcacgccatttccaaccggcggaacagctactgcaaaaccgccttaccgtggcacaacagagccatgccagccgccaactgctgcaacagctcaccgaactgctgccacaaggcaataaccgccaggcggtcagcgactttatccgccagcaatttggccatacggtgttaagccagctgagccacccgcagctccagcaagtgttgaacctgctgcggaccggcgaactgacaatccctcacccgcaacaaacggccaccagcgatcgttcgctgctgcctgcggaacatcagcacttgcagcagcaggtcaccaagctcagcgcggctaccggtgagacaacggccaaactctggcaggcactgttcgatctggtcggggtaaaaatcaacgatccgttgcccgcacgccactttcaactgctcagtcagtttatgcaggttaaattggcgctcagcccgcaaacggcgccgacgctgcaaaacctgctggcagtattgaaacagccagcagaccagcaggagcagcaacagctcaatgactattgccagaaccgctttaacggcaacctcaatacgccgttgacccacgcgcagctaaacgacgtgatccagcaactgtttacccgccgtctggacaaggctggccacgctccgtcgttacacagtgacgttcaacagccgcaaccattgcttaacccgctaatcgccgccctgccgcagcctttacagtcggtgttcagtaagcccttggcgctggttgtcggcgttatcgtattggcattggtactttgggcgctgttttaacagccgcactccggtgctttatcccgcccctgcatcgtcccctgctcaacaccgatggccaccgaatggccatcgcgtagccagaaatccagcccgccaatcagctctttgacccgaaaaccgagcttggccaacttgtatgccccctgggtggaaccgttacagccgataccgtcgcagtaggtgacatagaccttgtcacgatcgagagatgaggtgctgctttcatccattaagcggtggggaaagctcagcgctccaggaatatgcccggcggagtaaagcgcgctggcacgggtatcgatcaccacaatctcgctgacgccattgcgcaaatctttcgccacatccgccgagtcggcgtaaaagctgagcttagccgccagataatccaggctttgtgctaccgctgccgggggaaaagccaataccagtgaagagacgttcatagtgcaactccagtgccttaaggttgatgacaatagtgcctgattttggtcttatggttgagacccattttgccaaggtaataagaccgattatgtctcaggtattgctgacgctatttcaacaggcggataacgcgaagggcacgctacgtgagcgagtgtgtaatacgctacgcacggcgatccatagcggcacgttaagcgcgggccagcggctaccctcctcgcgggttctggcggccgatctgggcgtctcacgggttaccgccgaagccgcctatgcgcagctggaagccgagggatatctacatcgccgggtgggtcaaggcacctctgtcgctatccagatcgccaagcctgcgccaatacgcaaatccagcggccaactgcggctctcacagcgcggtttggcgattgtgcaaaccgggggctgccgtgatccactgcagccactgccgtttgctgctggttcaccggatctgcgcgccttcccgctgaagctgtggcaacagctcactgcccaacggttgcggctacagggggaaaaactgctgcgttatggcgatccccaaggctacttgccgctgcgtgaagccattgccggttacgtctgccaaacccgaggcgtgaactgcgacgcggaacaggtgatcgtactgaccagctcccaacaggcattgcagttgattgccaccttgctgatcgatagcggagatgtggtgtgggtcgaggagcctggttataacggagccaagaatgcatttaccagcgcgggagctaatctggtaccggttgcggtggatgaggccgggctacagccagacggctcgttacctgcccctcgcctgatctatctgacgccttcgcatcagtaccccaccggcgtggcactcagcctggagcggcgattggccctgttggaacaggcgcggcaatcgcaaagttggattattgaggatgactacgacagcgagtttcactatgacggccaaccgatgcccgccatgcagggtctggatcgccacggcacggtgctgtacgtcggcaccttctccaaagcgctgttcccttcgttacgtctggcctatctgattgtgccccccgcgctggtgacggcgtttaccaccgcacgttcggtctatgacggccattgcgcccagttggcacaggccgtcacggcagagtttattctgcaagggcattttgctgcccacattcgctacatgcgccaactctatcgcagccgccgcgattggctactgacgcagctagcacagtacctggggcattttgccacgccacagcacgcgtacggcgggctacagctcggcgtttggctaccggagggccaagaggcagaactgacccgacaggcgcaacagctaggcgtcattacccccggtctgtccacacaatatcagaacacccgcgccagacgcgacggctggttattggggttctccgcccttacgccaggggagataacgctggccgtcgagcggctgagtcgaattaacgcagtaacaaccaccccaccaacgtagcccaggccaggaacggtatcgaatagtaatggaaccgcagccagatttggcgttctcccgccatccgcagggcgatcaggttcgccagtgagccgatcgccaggccaaatcccccggcgtttaccgcataggccaccaaggcgctggaaggtacatagttcaacaacaaaatggtcgccggtacgttgctgatcacttgggataacgcgatccccaacacatacacgctgccgtccgccagcgaggcaatctggtcaaacaacggctgcagcgctggcagttgggtcagaaagccaatattgataaacatgggagaaatacaaagatcaggctccagtcaatctgcagcagcacctgccgagccaacagtagaaaaccggcaaacaccagtaacacgccatacaacggcacgtccaaatccagacagatcagaaaggccacatacagcgcgacactggccagcaacagacgcaattgataaggataaggttgggtgtttggggctttaacaattttccgcgccgggaagctgaaccaggtgaccaccagcaggctcagcatcataagaatgccaaacggtgccatgcgcccgataaactccataaaggtcagcgaagacttgctccacagcaaaatattctgcggattgccaatcggcgtcagcaacgacccggcgttaaccgccagtgcctggaagatgatcaggcggctgatcggtagtgaagagagctttttcagcgtaatggtcaacgggatcacgataaacagtgccacatcgttggtgagaaacgacgacagcaccgcagcggcacacaccagaaacagtgccagtgagcgttcactttgcagggtgttcacgatctggcggccgataaaatcgaaatagccgctaacctcaacgcctttggtcagcagcatcaaccccagcagggtcatgatggtgcgccaatcgataaagccagagagtgccctcagcggctgtggtccaatggcgtacagcagcatccccatcagcagcaacgcatgcaggaagcggtcatgcaaaaatggcctcaacaaactggtcaccgcatttgaactcatggatttactcttatttttcaagcgaagactggaaaacgacgttagccgaagctcttgaattacgccagtaaaaaagcacgttgccctttccatttatcgtattttgttttatacccgtcgtctttccctgcttttaggattttctatggccaattccattgccaaaaggctgctgctcagcgcggcgctgatgctgctagccgcctgtaacgatgccaacacccgcccccagatcgacatcgaaggcaaaaccatggggacgttctatagcgtgaaggtcagcggcactgtcaccgagagcaaacaacaattgcagcaggagatcgatgcactgctggagcaggccaacgacgatatttccacctaccgccccgattcggtgttatcccgcttcaaccagaacaccacggccgagccgcagcccatcccccgtggaatggccgatatcatcctcaccgctcagcgcattggccgtgataccgggggcgcgatggatatcaccgtcggtccattggttaacctgtggggattcggcccggacaagcgggccgtcaaagtccccagccagcagcaaattgatgcagcccgccagcatattggcctacagcatctgaaattactcagcgacaatcggggtgaatggctgcaaaaagatctgccggaaatgtatgtcgatctctctacgctgggcgaaggttacggggtggatcagttggtccagttaatggcgcgcaaaggcatcaccaactatctggtctcggtgggcggagccgtttcatcacgcggcgtgaatggccagaacaagccttggcgggtggcgatccaaaagcccaccgaccgggaaaatgcggtgcaggcgctggttgatctgcaaggctatggcatcagcacctcggggagctaccgtaactactttgagcaggacggtcagcgctattcccacgtgatcgatcccgtcaccgggcggccaatcacccataagctggtttccgccacggtcattgcccctacggcgttggaagccgatggttgggataccgggttgatggtgctgggcacggaaaaagcgctgaaactggccgaagagaaagggttggcggtgtatttgatcagcaaaaccgatgacggcttcagcgcggtgatgacgccgcagtttaaggcgtttttggtgcagtaaagagttttggctcacgtgttgtnnnnnnnnnnnnnnnnnnnnnnnnnnnnnnnnnnnnnnnnnnnnnnnnnnnnnnnnnnnnnnnnnnnnnnnnnnnnnnnnnnnnnnnnnnnnnnnnnnnnnnnnnnnnnnnnnnnnnnnnnnnnnnacgccctctccctgtgggaggggaccnnnnnnnnnnnnnnnnnnnnnnnnnnnnnnnnnnnnnnnnnnnnnnnnnnnnnnnnnnnnnnnnnnnnnnnnnnnnnnnnnnnnnnnnnnnnnnnnnnnnnnnnnnnnnnnnnnnggaggggatcgttcgagttcgctattcgttacnnnnnnnnnnnnnnnnnnnnnnnnnnnnnnnnnnnnnnnnnnnnnnnnnnnnnnnnnnnnnnnnnnnnnnnnnnnnnnnnnnnnnnnnnnnnnnnnnnnnnnnnnnnnnnnnnnnnnnnnnnnnnnnnnnngatcaacggccttttaccctgctagc

SEQ ID NO: 219 - DNA, 27745 bp, unknown
  Altogen  635822 strain
  misc_feature (103)..(141): n is a, c, g, or t
  misc_feature (215)..(255): n is a, c, g, or t
aatcctcctggatgcaccatattttgcagtatggtggggtagtaacgacataccatacggtatcaaaaaagaattcctgtgcatccatagctcagctggatannnnnnnnnnnnnnnnnnnnnnnnnnnnnnnnnnnnnnntcttcaagtgaagtttcacggaacgaaacccatcgctaaaaaaataaaactgcatccatagctcagctggatannnnnnnnnnnnnnnnnnnnnnnnnnnnnnnnnnnnnnnnnatgtacctatcgcgagcgctaacttgtagatagatacaatatggaaggtagcaatagggaggataatgttgcactgcaacagcccaacgggtgaagcgcttgcgctgaataatcctcctggatgcaccatattatagagaaacccgcttcggcggggttttcgttttctgctttccagcttccgtctttgcttcttataagctctcttctacaccgcattttccgtcatgctctggcagcgacaacctttcggctttacgctaaagtagctttctttgctcaatggtcatggagtcacgatgtacgatcgctatcagggtctgatcttcgacatggacggtaccattctggacaccgagccaacgcacctcaaggcgtggcacgaggtgttggcacgttacggaatgaagtttgatgcggccgccatgacagggctgaacggctcacctacctggcgtattgctcaggcggtgattgccgcacatcaggccgatctcgatcctcatcagttggccgccgagaaaacccgtgcggtagaaagcatgctattagacacggtgcgcccgttaccgctgattgaggtggtgaagtcttaccatggccgtcgtcccatggcggtagggacgggcagtgagcaccggatggcggagatgttactgcgtcatttagggctgttcgactgctttgatgccatcgtcggggcggatgatgttcaacgtcacaagccggagccggatactttcctgcgctgtgctgagttgatcggcgtgcctcctgagcactgtgtggtgtttgaagatgccgatttcggcattcaggccgccagaagcgccaatatggccgtggtggacgttcgcacgttgtgagtagtacgctggcggtcatgtcgctgtttggcagcagcttccttagtgcgacgctgttgcctggcaattcagagatcgtgttggttgcgttgttgaccaacagcagcgcttcaccaggtttactggtgctggctgcaacgttgggaaataccctgggtgggttgaccaacgtcattatcgggcgcctgttaccggcgttgaaaccacaacgcgggctggaaacggctcttggttggttacaacgctttggcccggctgcgctgttgctcagttgggtgccggttgtgggcgatttattgtgcgtgttggcaggctggctgcgcatgccatggggcgccgttgcgttgtttctgtgtatcggaaaagcgttgcgttacatcatcttgacgatgattacgctgcagggtatcgcctggtggcattaaccaagtgaatataactcaatattctctagggagcggattcagtatgcttacagctatcgtttttagaagcgggaggtcaatttgatcccggacgtatcacaggcgctttcttggttggaagcccaccctcatgcattaaaagggatccggcgcggtattgagcgtgaaacactgcgggtaaccgcggatggcacgcttgccagcacgggtcatccagaacaactgggggcggcattaacgcaccattggatcaccacggactttgccgaggcgctgttagaatttattacaccggttgatgatgacctcgatcacttgttgacgttcctgcgcgatatccatcgtcacgtggcgcgcaatctgggtgatgagcgcatgtggccgttgagcatgccgtgctttatcaacgccgagcaggatatcgaactggcgcaatttggcacctccaacattggccggatgaaaacgctgtaccgggaagggttgaagaaccgctacggcgcgttgatgcaaaccatttccggggtgcactacaacttctccctgccgctggaattttggcaggcgtgggctggcgttgaggatgaagagagtggcaaagagcagatctctgcgggatatttccgcctgatccgcaactactaccgctttggttgggtgatcccatatctgttcggggcatcgccagccatctgttcctcgttcctcaaaggccgggagaccgatttgccgtttgagcgcaatgaacggggcatgtgctatttgccttatgccacctcgctgcgcctgagcgatctgggttataccaataagtcgcagagcaatctgggcattacctttaacgatctgcaaacctatgtgcaaggtctgaaacgcgctattgcgacgccttcagaagactatgccaagctgggagtgaaagagggcgatcgttatctgcaacttaacagcaacgtgttgcagatcgaaaacgaactctatgccccgatccggccaaaacgcgtcacccatagcggtgagacaccgtcagatgcgctgttacgcggcggtatcgaatatatcgaggtgcgctcgctggacatcaacccattctcgccaatcggtgtggatgcggtacaggcgcgtttcctggatctgttcctggtgtggtgcgtactggcggatgcgccagaaatgagcagcgatgagttgctgtgcactcgtaaaaactggaatcgggtgatcctggaagggcgtaagccaggccagaccattggcatcggctgtaacgatactcgtgaaccgttggataaggtcggcaaagcgctgtttggcgatctgaagcgcgtggccgaagtgttggacagtgaagcgggcgatcgacaatatcagcaggtgtgtgaacaactggtggcggcgtttgacgatccggagctgacgttctcggcccgtatcctcaagcaaatgaaagcgcaaggcaccggtaacgttggcctggaactggcggaaaaatatcgcaaaatgctgattgcggagccgttggaactgctgaccgaagagcaactcgctcaggagcagcaagcctcgtggcagcgccagcgcgacatagaagccagtgatacgctaagctttgaacagttcctgaaggaaaacggcgggggctgaaaaagaaaaaggccacatcactgtggccaaatacacatctctgaaaacagtgatgatgataacaaatgcgcgtctttcatagattaagacccgcagggttggaaaaggtttcatcggtacgaaaaaagtttcgaaataaattcattttaccaagaggtgatgacatgccactgctggatagctttaccgtagatcatactcgcatggcggcgccggctgtccgcgttgctaaaaccatgcaaacccctcatggggataccatcaccgtattcgatctgcgtttctgtcgcccgaatctggaagtgatgccagagcgtgggatccataccttggaacacctgttcgctggcttcatgcgcgaccacctgaacggtaacggcgtggagatcatcgatatctcgccaatgggctgccgtaccggcttttatatgagcctgattggtgtaccggaagagcagcgcgtggccgatgcctggcaagccgcgatggcggacgtcctgaaggtgactgaccagcgcaagatccctgaactcaatgagttccaatgcggtacttaccatatgcactcgctggaagaggcgcaggaaattgccaagcatattcttgagcacggcgtggtagtgaaccataacgaagagctggcattgccgaaagataagctgcaagagctgcacatctagatttggtgcaaaaacacagtgaaaaaagacgcgaaagcgtctttttctttggcttgtatctagtggttctgcacgctggcctgtaaggattttatcggcgtgacgcgcacctgcttgatcatattgtcctgcacgtcgaggatatcaatatcatagtggctgatgcgcaccctggtcccgatgctggggatctcttccagctcttcaagcagcatgccgttgatggttctggcctcggtggctggcagcgtccagttgaaggccttgttaagctcacgcacgttggcactgccgtcgatcaataccgagccatcgctctgtggattgacttcctctgccagcgtaggtgacattgaggtggtgaagtcgccgacgatttcttcgaggatatcctcaaccgtcaccagcccctggatatcaccatactcatcgaccacgatgccgaccttctctttgttacgctggaatttcaccagttgaacgttgagtggcgtgccctctggcacgtagtagatctcatcggctgcccgcagcaggttctctttgttgaactcttttttctcggtcatcagccggtaggcttcgcgtacgcgcagcatgctgatggagtcgtccagtgaaccgcggtacaacacgatgcggccatgtggggagtgtgtcagttggcgcatgatcgacttccagtcgtcgttgatatcaatcccgacgatctcattgcgcggcaccatgatgtcttcaaccgtcaccttctccagatccagcacagaaatcagcatgtcctgattacggcgtgaaatctttgactgggactcgttcacaatggttcgtagctcctctttactcaacgcgccgctgatacgtacgttggtgcggatgccgaaaatccgcagcaccagggtagtaatgccattgagcagccacaccagtgggaacatgactttttgcagcggtgccagcaggaagctgctagggaaggcaattcgctcaggatagagagcggcaaaggttttgggtaacacttcggcgaacagcagtacgacaaaggtcagcaccccggtggcgattgccacgccaatatcgccatacaggcgcatcccgacaatggtccccagcgcagaggccaggatattgaccaggttgttgccaatcagcaccaggccaatcaggcggtcaggtttttgtagcagcttctctacccggcgtgcggcacggttgccctgtttggacaggtggcgcagacgatagcggttgagcgtcatcatgccggtttcggatgctgaaaaataagcggagaccgcgaccataatcaccaaaatgaaaatgagggtctctgtcgaaacgtgctccaacgcggtattccttatgttgggggagaagagtgccttggcgggcgatggagcgccgggccagacttagcgcaccatcatcagttcctggagcaggcggctcccgaagtaggccatggtaagcagaaaagagccggcaaagctgaaccagaccacgcggcggccacgccagccctcgtgataatggccccacagcagcacgatataaacaaaccacgccatgatggacagcacggccttatgcacgttctctttgctaaacaggttgtccatatacagcaggccggtacacagcgtcagcgtcagcaacaccacaccgatctgggtgatatgaaacatcttacgctcaatactcatcagcggcggcatatcggcactgaaactgagttttttatgtttcagcaggtaatcaagccaggcgagttgcagggcgtacagcgtggcaataatcagagtggagtaagagaacagcgccaggccgatatgcaccatcagttccgggctggcttccagatgggtaataaactccccaggcagaaagctggcaaacgccaggttgatcatcgcaaagctgtagacgatcggcagcaggaaccagccgcgatctcgggaggcgacataagtcatcaccgaacagataatcaggccaacgatggagccaatgttcagcaggctgagattttgcccggcgctgacgtcaaaaatgcgctgctggagggcaatggcatggcagaccagcgccactacggccgagaccagcgccagccgacggtatgcgctattcttccgcaacaaactgggaatgatcagtccaaggctgagcaggtaggccatcaaagccacaagagagaatactggcatagcgttatttagcatcggcatggttaattggaatgccagtataacgttgagcggcccctactccaaccaatctccaacgctgaggcagagatcgttgtagcaacgtgttataatcgccgcaattgtgtcgccactgcggcctgactcttacgttgagcatgagacgatgtttgaaaatttaaccgatcgattgtcgcgcaccctgcgcaatatcagcggccgcgggcggctgaccgaagagaacattaaagaaaccctgcgtgaagtgcgtatggcattgctggaagcggacgttgcgctgccggtcgtgcgtgacttcatcaaccgtgtgaaagagagcgcggttgggcatgaagttaacaaaagcctgacgccgggccaggaattcgtcaaaatcgtcaagagcgagctgattgccgcgatgggcgaagtgaacaccgagctgaacctggcggcgcagccaccggcggtggtgctgatggcgggcctgcaaggtgcgggtaaaaccaccagcgtggccaagctcggcaaattcctgaaagaaaagcagaagaaaaaagtcttggtggtttctgccgacgtgtatcgccctgcggcgatccggcagttggaaaccctggcggaaggtgtcggcatcgacttcttcccgtcagacgtgaaagaaaaaccgatcgacatcgttaaccgtgcgctgcaacaggccaagctgaagttctacgacgtactgatcgtcgataccgcgggccgcctgcacgtagatgaagcgatgatggacgaaatcaaacaggtacatgcggcgatcaagccggtggaaaccctgtttgtggtcgacgccatgaccggccaggatgcggccaacaccgccaaggcctttaacgaagcgctgccgttgaccggcgtcgtgctgaccaaggtcgatggtgatgcgcgcggcggtgcggcgttgtctattcgccacattaccggcaagccgatcaaattcctcggtgtgggtgagaaaaccgacgcgctggagccattccatccggatcgcgtagcctcacgtattctcggcatgggcgacgtgctgtcgctgatcgaagatatcgagagcaaggttgaccgcgcacaagcggaaaaactggctagcaagctgaagaagggcgatggtttcgatctgaccgacttcctcgaccagcttaagcagatgcgtaatatgggcggtatggccagcatgttgagcaaactgccgggcgctggccaactgccagacaacgtcaaatcgcagatggatgacaaagtgctggtacgcatggaggcgatcattaactcaatgacgctgaaagagcgtgccaagccggaaattatcaagggttctcgcaaacgtcgtattgcgatgggctccggcatgcaggtgcaggatgttaatcggttgttaaaacaattcgacgatatgcagcgcatgatgaaaaagatgaaaaaaggcggaatggcgaagatgatgcgtggcatgaaaggtatgatgccgccgggcttcccaggccgttaaaaccacgccgcagcaaggctgtggcgggtttgccgatttaccgatcacggtaaaacctgtccgagagcgtgatggtgcaaaaacgaattaccggcaatctacgctttagattgctttttgcgccaaaatgagtaaaattttcgggctttttatattgcaaccgggccccgtccctcaatggggcccggctgttttattaactaaagaggatgttatggtaacaattcgtttggcacgtggcggcgctaaaaagcgtccgttctatcaagtagtagtgaccgacagccgcaatgctcgtgatggtcgtttcatcgagcgtgtaggtttcttcaacccaatcgcatctggtcaggctgaagcactgcgtctggacctggatcgcattgagcactgggttggtctgggtgctaccgtttctgatcgcgttcacgcgctgatcaaagacgctaagaaagcagcttaatctgtcgcggtggtggcaatgagcaagcaactcaaaccggtagcacctaagcagccgattgtactcggtaagatggggtctacttacggcatccgtggttggctcagagtgttttcatccaccgagaacgccgaaagcatatttgactatcagccctggttaatccagcgctctggtcagtggcagtttgtcgagttggaagactggaaacgccacagtcaggatctgatcatcaaggtcaaaggcattgacgatcgggatgctgcgaatttactgaccaattgcgaaattgtcgtagattccgagcagttgcctccgctggaaggcgatgattactactggaaagaccttatgggctgccaggtagtcaccacttccggatacgagctgggtaaagtcatcgatatgatggaaaccggttctaacgacgtaatggtcgtgcgggcaaacctgaaagatgcattcggtatgaaggagcggttggtcccgtttcttcatgggcaggttatcaagaaagtcgatctcgccgccaagattatcgaggctgagtgggatcctggtttttgacctccggatataatggtcgaagcaagtggaataacaaaatggggattggctggtgttcattggtatcgtaagcctgtttcctgagatgtttcgcgcaatcaccgattacggggtaactagccgggcagtaaaaaatggcctgctgagcgtgcagtgttggagtccgcgtgacttcacctacgaccggcatcgtaccgtggacgatcgcccttatggcggcggcccgggaatgctgatgatggtgcaacccttgcgggaagctattcatgcagcaaaagcagcggcaggcgagggagcaaaggtgatttatctgtcacctcaggggcgcaagctggatcaaaccggtgtgcgcgaactggcggctaaccagaagatgatcctggtatgtggccgttacgaagggatagacgagcgcgtgatccaaaccgaaattgacgaagaatggtcaatcggtgattacgttctcagcggcggtgaactaccggcaatgaccctgatagactcggtcgcccgctttataccgggtgttctgggccatcaggcttcggcagaagaagattctttcgctgagggattgctggactgcccgcactatacccgcccggaggtgttagaagggatggaggttccgccagttttactgtcgggcaaccatgccgagatacgtcgctggcgcttaaagcagtcgctgggccgtacctggcttagaagacctgaacttctagaaagcctagctctgactgacgagcaagaggtgttgctggccgagttccaacgggaacatcgggctaagtaacaggactatgaagggaacgtctgagcgttgtctcgacgagaccgatatatcagtttacctagggtaagagacatattatgagcaacattattaagcaaattgaacaagagcagatgaagcaagacgtacctgcattccgtccgggtgattccgtggaagtgaaggtatgggtcgttgaaggtaccaaaaaacgtctgcaggcattcgagggcgtggttatcgctattcgtaaccgcggtctgcactctgcattcactgttcgtaagatttccaacggcgaaggtgttgagcgtgtattccagactcactccccagtaatcgatagcattactgttaaacgtcgtggtgccgttcgtcaagccaaactgtactacctgcgtgaacgtactggtaagtctgctcgtatcaaagagcgtctgaaccgcgttaactaacgctgcatccaaaagttaatagttataaggggattaccgtcatggtaatcccctttttttgtgggggtgacacgcagaacggatgtcgtgatccccaagaaggataacagtcggtgttagctccattatctggcgaacttgatgagcgctggagatctggtggcaacaaggccgtcagggctggctctactatgcgtacaacagtaaaacagttgacggctggcctaaatgttcggttcacagagaactgaaactcctggcagattactgatcccgttaacgtcacttaatcatcgagatgataagcgacggcgataggggcagttatcgccgaaagtacctcctctactgattggaactattacaatagggatctacatgagtcataacatttaatactctgtgattctctaatactctcttccttgcgttgacagcaatatcatgcccctctttaactgataaatgactatcaatatccaagtgtacatcaacaataatcaggtcacctaccttccttgttttaaaatcatgaacacccaacactccctccgttgctaataatgttgattttatttctttctcagtatcactatcgaccgctttgtccattaagtcgtgcagtgaatctgacataaatgaatatcccattttggcaactataaggccaactatgagtgctgcaacaggatcgaggaatttaaagcccaataaattaccaataatccccagagcaacgaccaacgatgaggctgcatcagagcgtgcgtgccaagcattagcaaccaacatgcttgacttaactcgcgtcgctacggctaacatatacctaaaaagtaactctttgaaaactaatgctatcaaggccacccatagtgcaataatatgaacttgaggaatagtatcaggattgtggattttgttgatcgcagaccataacataccaaggcctacaatgaacaatagagagcctagaattaatgaagctccattctcataccgaaagtggccataattatgatcctcatcaggttcttttttacttttattatttgcaacgataacaacaaaatctgcgatgagatctgagagtgaatgtattccatccgcaatcaatccctgagaaccggagaagatcccggtaataatctgccccaatgttaagaagcaattaacaactacacttacccatgtactttttcgtgcggcatggaaacgcacatgagattcattattactttcattaatcattttatcgtgtctcatatcatctttcagtgaataactaacaatgtacggttattgaatgacaacttttatctccttaaggtcttcttaagttatggcggctagactaacaccaatcgcaagggagaaatgatgattttaagatatttaaatatgccatccgtctacacttggcaagaaaatttttactgctagccttacatcatgaagttgataactgattgactactagcatgtctgtatcaagcatagcatcttgataaataattttattagctaacgttgagtcagagagttaccggttagcagaaggcgtacgagtattaatgaattgataccatcaatattctaggatgttatttttgtgtttaatttcaatgggatgtggttggttttatcgtctaactctcaatgtcgattgggttaatgaaaattcaaactttacttgaataggattaataatgaaaaaaaagttttcacctagccagattttatttcattgggttgtttttattctcatcgtactcgcttatgctaccatggagctaaaaggaattgcccctaaagggagtagtgctcgagagtggattaaaacccttcactatacattcggtttgagcgttatgctattgatgttattacgtataattttgaaggttatgcacaaggatcctgagattacgccaacaccgccacattggcaaatagcgctatccaaggcagtacatggcattctctatcttatgtttatcagcttaccgctacttggcgtcctgtctctttattacggcaaggttgagtggtcatttttctcttacgctatgcctgtaagcaatgaccagagtagtgatatgcagcatactttgaaagacatccatgagtttatcgcgaatacaggttatttcatcataggccttcatgcatttgctgcaatatttcatcattacattatgcgggataatacgttgattagaatgatcccgtggaaaaagtgatgttataaacccgtattatcttgccagtaaatgtgcgagtaatgtgttttccagcaatactgcttcggcttgactgatacccagtcatgacctttccttgtccttcaccacggcggcatcattgctgccgtggtttttcatatagcgcgtggtacgcagtttggtgaacatggccgttagctccgccgttggattttacgtggggcataacataaggcgtgctgtctgatgcctactttgacactaaagagtagcctttgaacactaactgtcgtatttatccaatacgaagaggcactggttttttaaactgcggccactgaccattgaatggagcgcatgaaatgcaatttgcctatacgattttatatgttgataacgtgcagcaaacgatggatttctatcatcgagcctttggctttgagatccattgtttgcatgaaagcggggactggggagaattggctaccggcgccacgcggctgtcattttgctcaagagagttgctggcagggcagggcaaaaagagcgctaaaagtgattatcatcatccggtgtttgaaattgccttcactaccgacgatgtgccgaaagcgctgaaaacggcgctggatgccggtgcggtgctggtcgaagatattcagcacatgccctgggggcaaacgatatgctatgtggcagatccagagcataaccttgtcgagatctgttctgtaatggcttaatcgtagccttcaccaaacgcctgttgccaatggggattgatacggaatgcggcaggcgtgatccctaaccaatgctggaactccctgttcatgtgcgattggtcacaatagccactgttcagcgcgatttctgtcagggggacacattcgcaggcagttagcactgatgcagttcttctcatccgtaatagacgaagccagaataacgggctcttgccggttttgttcttcaccagccgttccagagtacgaacgctgatccccaactcctggcttgcctgagtcagagagttggcaagccgtaacgacagcaatgtttcggcaagctgcgtatctacacgaacggtatcgtgaatgatggactgtaatgttggatggtccggtgttaatcgggaagcgttgaggtaatggaataacttgccctcatcgataacacaatctggctgaaaccggaaaccctcataatggtcccctgcagcgctttccacgccataggcgcaggtgtcgatctcagtgatctttatctcctgccgcccattcctgtcagtcaggaaaattaaatcccgacagccatcaggaacaacaatttgccgtgtcgtttttggcgaatgaaaacttcagtgttccaagaccaactgttgcatttgatctccctatcatctcaaagacccggttctccaaagcttaccatctattcgccctggttggattatcgttattctggtggcattggtttgaaaccaagggattaccagatggtaaccccttttttcattacatcgcggcggcgcgttgtttgccttcttgcgggtgcggctgcgccggaatgatgtcgccgggtgaaacgatgacccgggccacggattcatgggtggcaaaggtacaactgcagttaatgttacggcattggtgatagcgttctttggtcgattcactcagatagcggctggagcgagtgtgtgccacgctaccgcacagtggacaatgcatcatagagaccccctcttgataaaacggtgaaaaactattcgtcagcaatgctcgaaaaagttactgagcgagctgttctttccctgggaaactggtggtgttcggcgtgctgagacctttgaggcacagctcacgttcggcggcgcggcggcgttccagcccgcgatttttgacgccattgacataaatccagcgtggtaactgatcgcaagcctgttgccattggccatggttaaggaaataaaccagggtagagcgacaggcggcccccgtaccgacgttaaaggcaaacgccatgacggcatcataagtggcctggggcatctgctgtggcaggcatgccgccatgcggctctctacccggcggatatcttccagcaggttttccgccgcttgcactggcgtgatggacttacctggaataacgccggccgtatggccgacaccttgcgtccaaacccctgctgagcattgatacggggttaactggcacccctcaaaatcggcaatcaggtacagcccttgttcggaagttttaatttgattagcctgcggcagcagcatggcgatcgccagaatggccagggcgctgcaacgcttaacgattgaattcatcaaaaagtctccgtgctgccgcatcgcgctcgatgcttttgaggatctccagactcttgcgtctgtagtaccaattaaccaggaaggtgccgatccctacggccgcgccgatcagaaaggccacatcctgcggtgagagcttgccaagccaggcgagaaacagcgctgcggagtaggtaatgaatgaggttaatctctccatcctattaaccccatatctgcagtcgcagcggattgttttgtaggataacgcgacggtcggccacgataagcgagtcgatactggcctcatttgccgggtttatcatggtttttaccttagcaataattactgtatatgcatacagtattaatcaaaatgctaaagtcgtcaagcaaggataggactatttttagcaaaatggtcaatgcggggatgggcataaaaaaagcccattaattatgggcttagagaaggactgcgcggagctgtaagacgagattacaaaccgtacaccagcgttactgaagtcgtggtatcggtatttttcggtgccgaggccggtggtttggtgttgtagaccaccgtgtaggccagccgtagggcgaagtcgttattgatggagacgtttaacgcggtttcggagttaacggtggtttcgtcgttcgccaaagcggacaggccttcggataggcgggccgtgtctgtcagcctgtaggaatagttggctgcgccataggccagggcgcgagtggtgcggccaccgccgtggtattcatcatggcgaacgcctgggccgaattcgacacgcaggtcctggcgtgggtcgctaaagatctggcgcccgtaacctccggtcagcgtagaacgtgaatcgtaaccgttgtaacgatcgttcaaccagccaacctggccaaacatataattacgagccgtcagattataacgggtacggccaccggcctggtatttctccgaggagcgtacgttggaagaggtggtattgttcgccgagccccacaggctgtaagccgtatcgctgttaaaccaggtcatggtggtgttggccagcagggctgagttctgtgtgttgccggactgggcgttatagccagcttgaacattaccatcaaacggcttcttggcggtggccggatcgtccatcgcggtgaagagggtattgtcggcgaacacggaaacactggtgaaggcggtcaagcagctaaaaaacagcggaatggcgcgacaagcgcgtaaagagtgcattttggatccagtagttaagtgtgattataagtgatagcggtcacattatatcgattcgccgaggggacaaaaataggcctggttagcttatgtttttagtttaaacaggggacttatgcacttttcgtctagtgataccgttggctttttgtggcggtgttaatagcggcaacggggatcgcccgttgccggcagaaacgcgattaaaggaaggtcattaccagcagataaccggtgatgcaggagcacagcacgccgatcaggccagggatgatgaagctgtggttaatgatgaatttaccgatgcgagtggtgccagagcggtcaaaaccgatgcaggccagatcgcttgggtaggtgggcaacacgaagtaaccataggccgccgggaagaaggccagcaacattttaggttcgacacctaactgcaaggccattggtgcaacggcggccagggcagcggcctggctgttaaccagtttggaaaccaggaacaagacgatggcgtatgtccagggctggcttttcaccacgtcttccagcaccaccttcaactctcccatatgtgcctggaagaaggtatcactcatccatgccacaccgaataccgagaagatggcgaccattcccgctttgaacacggcaccgttggcgatatcgctaggtttgactttacagcccatcaggatcacggcgccggcgatcagcatcatcatctggatcaccagattcatcgacagcggtttcaatacgcccttggcatcggcaaaggaaggacgcagatcggcaaaggctccgagcataaccacgatagcgatagcgccgaagaagatcagcgttgaccagtatgcctgtttgggaaatgtttgattgagcagagtttcggtgccgccatagatataggtgcgctgctccggatcttggatcctggcctggaaatccgcatccttatccagatctttgccgcgacgcaggctccacaatgccgccatcaatacgccgaccaacgaagccgggatcgaaacggccaggatctccagcagcgagtaggctttgccgatcccatgaccggcggcaatgatcgaaaccagtgataccacggctacagaaaccggggatgcggtgatggccatctgtgaggcgacagaggcgacggccatagggcgttcagggcggatcccttttttgatggcgatatcagaaatgatcgggaacatggtgtagaccacgtggccggtaccgcacaggaaggtcagcgtccaggtggtaaaaggggcgagtaaggtgatgtgttgtgggtggcggcgcagtagccgctcggcatattgcatcatgacattcagcccgccagcggtttgtaacaccgaggcgcagccgatcaccgccaaaatggtgagcatgacatctactggaggtttacctggttctaaaccgaatataaaacacagcagaaataagccaatgccacttattaatcctaaccccataccgccaaatcgggtgccgactaataggcagataataataattgcgaattgcaatgtgatcatgagagtcccttgtcagaaagaaaaaactgctagcgctcatcgctcctcaatgcaggcggtacgggctctgtcttcgcagggtaaccctaaagaggtgtgggcgatttatgccatagttatttatttggcgagggataactgtgaggttccgcaatatttattcaatagagtgactattatttatgatatagattcaaatgaataaagaatgaaaatcaattgccagttaaatgtatgacaattgttttatagttgtttaatttggcaagggatagggcgggtttgccaaggaacttgttacctgcgcggcgtggcatacagcgctcctacacgcagagtaggctgttttttgagcgcgtgaggaccaatgaataactcattttggtgttcaattttgtttacattgcgtagattttaggggggcttctgttggtggtttgtcgttatgctctattatggagtcaatttaaaatcaaaataaaacaatgagttaatttggtttttgtttgttgtggcgggtgattccctttcctgttttggatggtaattttttatttacagcaaatggattgaaaactttacaaggagtggttaaggtagcacctgtaacgctcaatgttttcactacgctcacgcataacggcaaacgacaggaatagcatcatgcaaaaagacgcgctcaacaacgtacatatcagtgcagaacaggttctgatcaccccggaagagctgaagaaccagttcccactcagtgccaacgatgaaacggaaatcgctacggcccgccagaccattgccaatatccttaaagggcaagatcaccgtctgctggtggtgtgtgggccatgttcgatccacgatcctgatgccgcgctagattacgcgcgtcgtctgaaaaccctgtcggctgaattgagcgatcagctgtatatcgttatgcgcgtctattttgaaaagccaagaaccaccgtcggctggaaaggcctgatcaacgatccgtatatggatggatccttcgatgtagaagcgggtttgcacattgcgcgtcgcctgctgctggatctggttggtatgggcctgccgttggcgaccgaagcgttggatccgaacagtccacaatacctgggcgatctgttcagctggtcggcgatcggtgcgcgtactacagaatctcagacgcaccgcgaaatggcttccggcctttcaatgccggtgggcttcaaaaatggtacggatggtagcctgggcacggccatcaacgcgatgcgcgcagcttccatggcgcaccgttttgtcggtatcaatcaggcgggtcaggtttgcctgctgcaaactcagggtaacccagacggccatgtgatcctgcgcggtggtaaaacgcctaactacagtgctgagcacgttgccgcctgcgaaaaacagatgcaggatgcgggactccatccgtccttgatgatagattgcagccatggcaactcaaataaagactatcgccgtcagccagcggttgccgaatccgtagttgagcagatcagagcgggtaaccgttcgatcaccggcatcatgctggaaagcaatctgcacgagggcagccagtcttctgaacagccgcgtgtggatatgcgctacggcgtatcggtgaccgatgcctgcattaactgggaaagcacggagacgctgctgcgccaaatgcatcaggatctcggcgctgcgctgatggcacgcactggagagtagtgagttatggtggctgaactgaccgcattgcgcgatcaaattgacgaagtggataaagcgctgctggctctgttggcgaaacgcctggagctggttgcggaagtaggggaagtcaaaagccactacggtttaccggtttacgtacctgagcgtgaggcggcaatgctggcctctcgccgccaggaagcggaaagcctcggcgtgccgccagatttgatcgaagacgtgctgcgccgggtgatgcgcgaatcctacaccagtgagaacgataaaggcttcaaaacgctgtgcccacagctgcgtcctatcgtcattattggcggtaatggccagatgggccgcctgtttaaccggctgctgacgctgtcgggttatcaggtcaaggtgttggatcaagaggattggccgcaggcggatagcctgctggcggatgccggtatggtgattatcagcgtaccgatccatatcaccgagcaggtgatcgcccaactgccgccgctgccgcaggactgtattctggtcgatctggcttcggtgaagaaccggccattacaggcgatgctggccgtacatggcggcccggtactggggttgcacccaatgtttggcccggatgttggcagcgtggccaaacaggtggtggtgtactgcgatggccgtcagccggaggcctaccagtggctgctggagcagttgcaggtttggggcgcgcgtttgcatcgtatcagcgccgtcgaacacgatcagaacatggcctttatccaggcgctgcgccactttgctacttttgcttacggcctgcatctggccgaagagaacgtacagctggaacagttgctggcgctctcttcgccgatctatcggctggagctggcgatggtggggcggctatttgctcaggatccgcagctgtacgccgatatcatcatgtcttcggaagacaatattcatctgatcaaacgctactatcagcgctttggtgaggcgatcaagctgcttgagcagggcgacaaacaagcctttattcaaagcttccagaaggtggagcactggtttggtgattatgcccagcgcttcctggttgagagccgttccttgctgcgccaggcgaacgatagccgtcaatagatgaaaaagggttcggcatagccgaaccctttttgcgacttaagacggattgaccggcaccacgttttcgcttggatagcagcccagcactttcagcgagcgggtaatcggtgtcagccctttcaacgccttctccatcgcgacagaacgcaggttagcctgcacatcaatgtaaaacatctcttcccatgggttaccgttgatcgggcgtgattccagcttggtcatgatgatgccattgtcacgtagcaccaacagggcttccaccagagcaccggattgttgaccggtggccatgatcagcgtggttttggcaggaacctgctcggaaacctcaattgccttacgcgccagaataatgaagcgagtgatgttctgctgctgattagccaggttatgttccagcacttgcagattatacagcgcccccccggcctcgctgcctaacgccgcagcttttggcgagttcagcttggcgaccttctccatcgcggcggcggtgctttcgcaatactcaatcttccagtggggatagcggttcaaatactggctgcactgctggaaaggttgcgggtggctataaacggtttcgatctgctgcagatcggtgtcgctggctaccagcacgcagtgatcgatcggcaaggttagttcacccacgatcgacaggctggtatgttgcagcaggtcgtacacatcgttgatagaaccggagctagtattctcgatcggcaaaatggcgtaatccgcctggccggtttccacctgggtaaagatgtcctggaatttctgacagccgcattcgatgagctgatcgaaatggcgagcggcgtactggcgtgcggccagatgtgagtaagagccttttggccccaggaaggcaatgcgcgcggaatgttggctagtctggttaagctggtgctgcaacagagcctgctgagtcagcacggagtcttcgataatcagctggaacaggcgggtgacgtaaaaaccatcgaggtcataaggtttggccgcgctgatcaaggcgtccaacagatcgcgctcacgctctttatcgcggatcgggcggtgcgaatgcagtttggttttgcccacttccaccgccagttcacggcgctctgccagcagggccagcaatttcatatccagtgcgctgatgcgttcgcgcagcacgagtaatgggttatcagtcataatcagctttgccttgtattcttatgttcccgtcgtcttgcaagccgcagcttgaagcccagcggggcgggttatcaaatagccataaaaaaagccccctgtttgaggaggcttggttgttcgtcttcgcattctttctcacacgacgaaacgcctcccaatcaggggaaggtaaaaaagaatgcgaagaaaaacggtttacggctcatggcgttccaaaatgtgtgtaaatcagggtgtaaagtaaccgctggcttttcattgtgtcaatagaaaccggcagacaaaaaacgcgccctcgggcgcgtttgatgtgaaacaatcacttgcagagttattcctcttcttcctgcgtgattaccggagccaggtctttcacgctggcataagcgcggcgtgcctcgctcttgtgttgtaccttgttcaactgacgctcaagtttggcaatcaggtcattaacggcggtatacatgtcttcatgtttggcgctggcaaccagcggaccgttaggcgtggtaatggtggcgtcgacggcaaaccctttaggttctttagataagacaatgtgtgggttgatcagctgcgcctgccacttttccagtttactgagacggtcttcgacatgattacggattgcgggggtgatatccatttgtttgctggtaatgttgagtgtcatataacttacctctctgtctttccgtcttggatagattcagcataccgctctttttgccgaaatgcgtgatgtaaaacacaaatttttgtcactttttgcaaagttagttcaatctgtgatttagcgtctgaaaccgccatctaacgcttgagtcttggcagcagaacgcgcattatcgataggttaaccggtggtaaagccttgctaacaccgtgtttttgcttgtgtatttatcctgaaaatggctgaatttacagcaaatgaaaacggcagccgaagctgccgttttgtttttgtgcaaatctcaaatacttaagacgcgttggcggcgatgatttttgctaccttgtcggcttgagcattcaattgcaactggcgataggcgttttccatcagcggcagcgcatcgcgggtcgctttggtgtccgggaattcacgcatcatctgctcaacacgattaactaccgcgacgtaagcgccacgtttagtgtagtattccgccactgagagctcgtacttggatagacggtccttcaggaataccagacgcttgtaggcatcggtcgcgtattggctgttcggatactgctggatcagctggctgaagtcgcggaatgcggcgcgggcatgctgtggatcgcggtcagaacggtcaaccccgaagaagccttgcagcgcactgtcatccaacgccatatccgtcagaccgcgcatgtacatgacgtagtcaatgttcggatgcgttgggttcagacgcataaagcgatcgatagaggcctgtgccaaaggtaaatcggcagatttatagtaggcatagatcagatccaattggacctgctgagagtacggcccgaatggatagcggttatctaacgcttcgagttgcgtaatcgcgcccttaaagttaccgtcctgcagtttttgctgggcagtagcatagatttccgaaggcgggttgtcgggaaccgcatccttggatgtggagcaacctgccagcgccaggctcaacgtggctgccgccaccagatatttcatacgcgtcatgacgtttagattatcctcagggtgttattccgggagactgtccgttaagctcccgacaaaagaccagttacaatagcacattatattaaacggcatcgccgtgaaaacccaacgttaacgaagaagctgcatatggcacaacaagtacaactcaccgcaacggtggccgaaactcaactcggacaacgtttagatcaggctttggccgaattgttccctgattattcaagatctcgcataaaagaatggatcctggaagacagggtacaggtcaatggcaaaacgataaacaagccgaaagagaaggtactggggggagagacggtcgccattgatgcacagattgaagaagaggcccgttgggaaccgcaagacatcccgctggatatcgtctatgaagacgccgatattctggtgatcaacaagcctcgcggtctggtggtgcacccaggtgcgggtaacccggatggtacggtgcttaatgcattgttacattatttcccggagattgccgacgtaccgcgtgccggtatcgttcaccgcctggacaaagataccaccggcctgatggtggttgccaagaccgttccggcgcaaacccgtctggtagaggcattgcaggagcgtgagatcacccgtgaatatgaagcggtggcgatcggcaccatgaccgcgggtggcacggtggagcaacctattgcccgccactccaccaaacgtactcacatggccgttcacccaatgggcaaacctgcggtgactcattaccgcattatggaacatttccgcgcccatacccgtttgcgtttgcgccttgaaaccggccgtacgcaccagatccgtgtgcatatggcgtatatcgaccatccgctggtgggcgatcaactctacggtggccgtccacgtccgccaaaaggggcatcagaggccttcatcaacacgttgcgcggctttgaccgtcaggcgctgcacgcaaccatgttgcgcctgtatcatccgatcagcggtatccagatggaatggcatgcgccaatcccacaggatatggtcgatctgatcaatgcgctgaagctcgataccgaagaattcaaagatcagatggattggtaatgagttcgctgattgtacccgattggccgttgcctgcaggggtaacagcctgcagctccactcgtcatggcggtgtcagccttcctccctatgactcgctgaacctcggtgagcatgtcggggatgatgcacaggccgtggcgcgtaaccgccaatgcctggtaacggcggctggcttgccgcagatgccgctgtggctggaacaggtacatggcactcgtgtaatgacgctcgatggccaaacgcctgaagatttgcgcgccgatgcggtttacagcaatgtggccgggttggtctgcgcggtgatgacggcggattgcctgccggtgctgtttgcttcacaagcgggtgatgaagttgccgccgcacatgccggttggcgtggcttatgtcatggcgtgctggaaaataccgtggcgcgctttgctgccgcaccagaaaacatcactgcctggctcgggccggctatcggcccaacccggttcgaagttgggggcgaagtgcgtgcagcatttatggatattgatagcgccgccgctgccgcttttactccccacggtgaaaaatttctcgcagacctctatcttttggctcgccagcgccttcaacgtgctggtattttcgccatttatggcggtaatcgttgcacaatgaacgaaatgagtcattttttctcctatcggcgcgacggaacaaccggacgtatggcaagtttgatctgggtgagataacctactgccctaggacgatccactgatgcatgacgttgtactcataatatagtgtcgagataaccttgaaaatttgagggatgacctcatttaatctccagtagcaattttgacctacattggaggtgttatgcgtctggatcgtcttactaacaaattccagcttgccctcgccgatgcccaatctttggcccttgggcgcgacaatcaatttattgaaccgttacatctgatgagcgccctgctcaatcaggatgggggcacggttcgcccattactgacttctgccgggattgatgctgcgcgagtgcgtaccgacatcgatcaggcattgtctcgtctgccgcaggttgaaggtaccggtggggatgttcaaccctcacatgaactggtacgcgtcctcaacctttgcgacaagctggcgcaaaagcgggcagacaaatttatttcatccgagctgtttgtgctggcggtgcttgaagatcgcggtaatttgaccgatctgctgaaagcggccggtgccacagcggacaaaatagccaaagccattgagcaaatgcggggaggagacagcgtggatgaccaaggtgctgaagatcagcgtcaggctctgaaaaaatacactatcgatctcactgagcgtgcagaacaaggcaagcttgatccggtgattggccgtgatgaagagatccgccgcaccattcaggtgctgcaacgccgtaccaaaaacaacccggtactgattggtgagcctggtgtcggtaaaaccgccatcgttgaaggcttggctcagcgcattatcaacggtgaagttcccgaagggctgaagcataaacgcgtgctttccctggatatgggcgcgttgattgccggggcgaaataccggggcgaatttgaagaacgcctgaaggcggtgctgagcgatctttccaaacaggaaggcagcgtcatcctgttcatcgatgagctgcataccatggtgggtgccggtaaagctgatggcgcgatggatgctggcaatatgctcaaacccgcgcttgcccgtggggaactgcactgcgtaggggcgaccacgctaaacgagtatcgccaatatatagagaaggatgctgcgctggagcgccgcttccagaaagtctatgtcgcggaaccgagcgtggaagacaccatcgccatcctgcgtggcctgaaagaacgctatgagctgcatcaccacgtacagatcacggacccggcgatcgtagcggcgggaaagctgtcgcaccgctatgtttccgaccgtcacttgccggataaggccatcgacttgatcgatgaggccgcctccagcattcgtatgcagatggactctaaaccggaatcgctcgatcgcctggagcgccgcatcatccagttgaaactggaagagcaggcactgaacaaggaatcggatgacgccagcaagaaacgcctggaaatgctgagtagcgagctggagcagaaagagcgcgaatactcagaactggaagaagagtggaaagcggaaaaggcttcgctgtctggtacccagaatatcaaggcggaactggaacaggccaagatcacgctggagcaggcgcgccgcgtaggtgaccttgggcgcatgtctgaactgcagtatggcaaaatccctgagctggaaaaacagcttgaggcggccacgcaggcagaaggcaagaccatgaagctgctgcgtaaccgcgttaccgacgccgaaatcgctgaagtattggcgaaagcgaccggtatcccggtggccagaatgctggaaggtgagcgcgacaagctgctgcgtcttgagcaggaactgcactcacgggtgattggccaggatgaagcggtgaacgcggtgtccaatgccattcgccgtagccgtgccggtctttccgatcctaaccggccgatcggttcattcctgttcctggggcctaccggggtgggtaaaaccgaactgtgtaaggcgttggctgggttcctgttcgacagtgatgacgcgatggtgcgtatcgacatgtccgagtttatggagaaacactccgtatcgcggctggtgggtgcacctccgggttatgtcggttatgaagagggcggttatctgacagaagcggtgcgccgtcgtccgtattccgtgatcctgctggatgaagtggaaaaagcgcacccagatgtgttcaacatcctgttgcaggtgttggatgacggacgtctgacagacggacaaggtcgtaccgttgatttccgtaatacggtggtgatcatgacttctaacctgggttccgatctgatccaggagcatttcggtcagatgagctatccacagatgaaggaatcggtcatggagatggtgagtcaacatttccgtccggaattcatcaaccgtatcgacgaagtggtggtgttccatccgctcggccagaaacatatcgcgcagattgccaagatccagttggcacgtctgtaccagcgtctggaagagcgcggctacgaagtcagcatcacggaaccggctttggagctgttgggcaaaacgggttacgaccctgtgtatggtgcgcggccgttgaaacgcgctatccagcaggaaatcgaaaacccgctggcacagcaaatcttgtctggcaagttgatcccaggcaaaccggtgacgctggacgtggaaaacgaccatatcgttgccaagcaataaaagtagctgttggtagctatatagaagggggcggtttttaccgcccccttttctttggctttagcctggttgacgggttttcttcgagcaaaactcttaaaaccttccttttttgctcaataaatacccataaatgacgttttggctggttttttgaacgcttgaaaagttttttgaattt

SEQ ID NO: 220 - DNA, 537 bp, unknown
  Altogen  635822 strain
  misc_feature (103)..(149): n is a, c, g, or t
  misc_feature (269)..(299): n is a, c, g, or t
  misc_feature (397)..(447): n is a, c, g, or t
tgtattgactgccagttgccctgaaaatgtccactgctcagtctgcgaaggtgaaataatggcacgcccatcaggagaagttagatactggattaccgtaggnnnnnnnnnnnnnnnnnnnnnnnnnnnnnnnnnnnnnnnnnnnnnnnaaagtagttcgtggatgtgtcgcaagcgccatcgtcacataaattagaagtccatgtaagaggtgaggtcagagtaaatgacgtccctaagtgaagctttacgccaacgcccggtatatnnnnnnnnnnnnnnnnnnnnnnnnnnnnnnntactaagacttggttgtaagtaaacctaggggcatcgggcacgttcaatgaacattggatagtgaaattcgatgtttgaatatttgcttcatagatcnnnnnnnnnnnnnnnnnnnnnnnnnnnnnnnnnnnnnnnnnnnnnnnnnnngggtgttcccacagtacaagtaaaatcggcggcataagacaggttactaaacagcgccatcagcacaccgcatgacaggacaaacgcttt

SEQ ID NO: 221 - DNA, 167153 bp, unknown
  Altogen  635822 strain
  misc_feature (20464)..(20498): n is a, c, g, or t
  misc_feature (20525)..(20622): n is a, c, g, or t
  misc_feature (20660)..(20793): n is a, c, g, or t
  misc_feature (20824)..(20921): n is a, c, g, or t
  misc_feature (66730)..(66730): n is a, c, g, or t
  misc_feature (104210)..(104210): n is a, c, g, or t
  misc_feature (107859)..(107973): n is a, c, g, or t
  misc_feature (108203)..(108332): n is a, c, g, or t
  misc_feature (118040)..(118046): n is a, c, g, or t
  misc_feature (144168)..(144168): n is a, c, g, or t
  misc_feature (166789)..(166887): n is a, c, g, or t
gggggaacaacagacgatcaagccaaagtagatgggcatccttaaagcgctgcgatcagggcttccaactggccgcgattggtctgtttggtatctaccttcacgtaagcgctgcgttcctcgggaaccacaaccgcttccgctacgcccggctgagccagcaaacggctttgtaacgccgaatcttttaccgccagttcagacaacgtgatacgcaggctgctgacgtatggtggctctttcatggtgctgctgaccacaaaccagacggcggcaagtaccgcaccggcgataaagaccaatcctgctccctgaaaaccatataaccagccgcccacgctgccgccgatggccacgccaataaactggctggtggagtaaacgcccatcgccgtgcctttataacccgcaggggactctttgctgatcagcgaaggcaggatggcttccatgacgttaaacgccataaagaacagctgcaccccggcaatgatgccccatagatgctggccagaaaaccacagcaccacctcggcgcaaaacagaaccgctacgcagcccataaagacctgcttcatgcggcgatatttttctgcatagatgataaatggcactacggcaatgaaggaaaccaacatggtgaccagatagactttccagtggtccgcagcggccagcccagctttttccattgccaacggtagggcgacgaagctggacatcagcaggatatgcaggcacaggatgccaaagttgagtttcaacagccgcgaattattcagcaccttgctgaaactgccccgtacgatgctcgactcccggttcagtacgtgttcgtcagcagaagggacgaccagcaaggtaatagcgataccggcgagcgacagcacggctatcatccagaacagcgcatgcaaaccgaaagcatgggtcactatcgggcccaccaccatggcgatagcaaaggtgataccgaagctgatgccgataaacgccatcgccttggtacgattctgttcgcgagttaaatccgacagcagcgccatcaccgcagcagctattgccccggaaccctgcaatgcacggccaagaatgatcccccagatagagtcgcttaaggctgcgatcacgctgccaagggcgaagatcaacagcccgccgacgatcagcggcttacggccaacgcggtcggaaatcaggccgaaggggatctgaaataccgcctgcgccaggccataaataccgatagccaggccgatcagtgcctcgctggcaccgtgcagcgccatcccataggtggtcaggaccggtaacaccataaacatgccgagcatgcgtagggaaaagacggtacccaagccccaggttgcgcggcgttcttggggcgtcataatattgtcgttcatgtaaacctcagttaacccgtcgcctttcaagttgcagcgttgttacctgcacttgcttaccccagtcacttacaaaagtaagctcctggggatgagcaagattgtcgcctagctgcaacttgaaattcatagggtatcgaacctattccaacaggttaagcgggggacttagccagttggaatagcctcggcaaagttgcgtcattctagtgcgtagggcagggggggtaaatcgaatgttgtttaacagatattacagttggcgtgcttttctccgaaacaaataaaatgggccgctaagcggcccattcgcagataaccgctgttttaccaagcgtaggtcaacagggtttccggtgtcgcactggcactgaaatcgatcgacatcattacgctgagtgaagtaatggccacgattgagaacacaaacagtttgcgcgcccagacgctgtcattttccgctttgtagccgcgtaacgccatgcctaaccaccatacgctcaccgccgctgcgacgatcaggtatttgtagccggcataaccgcccagggtcaacatcagcgtggcgatcataaacgccaggatgtagagcgtaatgtggtttttggcaacggagatgcctttcaccaccggcagtaccgggatgttggctgcctggtaatctttaaagcggaagatggcaatcgcataggaatgcggcatctgccacaggctgaagatggccagcaggatcaatgcaccagcgtcaaactcgttggtgaccgcgcagtagccaatcaccggcggcgcggctccagacaggctgccgatcagcgtgccgtataccgagtggcgtttcatgtacaggctgtaaacgccgacataaaccacaaagcccatcaccgccagccacatggccaacgggttggctgcgatatacagcagtgcaaaaccagcaatacccagcaaggtagcgtaaaccaggctcacactcggcgtgatcaggccttttaccagcacccggttcttcgttctctccattttcttgtcaatgtcgcggtcaatgtagttgttaaatacacagcccgaggcaaccaccaacgagacccctaacagggtggcgagaaacaggggatagtcgatgctccctttggaagcgagcaggaatcccccgacgacagaaattaaattaccgaaaataattcctggtttagttacttgcaggtattgcttaatcatcacgtccagctctgctcttaatcgaccatcatgttgatgttgaggttgtacataatccagagtgaacccacaacaacgataccgatgatcatagcggtgaacagcaatgccaccaggttccagcgctcttccgatgaggtgttcatatgcaggaagtaaaccaggtgaacgatcacctggataaccgccatgccgaccacaaccgccaggatggtggagtgagaggcgctgccgctcatcaccatcgcaaatggaattaccgtcagaatgaccgacaggataaagccggtcagatatgacttcacgctaccgtggcttgcgccgccgtgagaggtatcatgggatgaatggctcatttacattacccccagcaggtagacaacggtaaatacgcagatccagaccacgtccaggaagtgccagaacaggctcaggcacatcagacgggttttattggttgggttcaggccacgcttgctcacctgaatcatcatgatgatgatccagatcaggccggtggtcacgtgcagaccgtgagtacccaccagcgcaaagaagctggagaggaacgcactgcgatctgggccgtaaccttcggcgatcaggtgatggaattcatagatctccatcgccacgaagccgacgccaaacaggaaggtcaggaacagccaggtgttaacgctgcttaccttgcccttgttcatgccgatcatcgccataccgtaggtgatggagctgaacagcaggaggaaagtttcaaccagtacaaaattcaggtcgaagatatctttcccagtgggaccgcccgcggtcccgttcaccagtactgcataggttgcgaacaagctcgcaaacaaaatacagtcgctcatcaggtagatccagaatccgaagaccttggtttctcctgcgtcgtggtgcccatgctcggcatgggctgcgctatggttggtcagagtatcagttgacatgtttcacgcctgctttgctgatttgttcatagtgttggttctcaatgcgctcgatctcatcaaccggcacatagtaatcaacatcttcatcgaagctcttgacgatccaggtcacgatcatgccgacgaagccagcaatcgccatccaccagatatcccagatcatcgcgaaaccaaataccaggctgaagccagcaataatcacaccggcgccggtattcttcggcatatgaatcggctcgtacttcgcggggttcttataggcttcgcctttttctttcatgtcccagaacgcatcacgatcgtgaatttctggcactacggcgaagttatagaacggaggtggtgaagatgttgaccactccagcgtacgtgcaccccacgggtcaccggtcagatcgcggttctgctcgcggtcacggatactgacgtaaacctggatcacttggcacaggataccgcaggcaatcagcgctgcaccgccagccgcaaccagcagcagagggtggaactcaggattgatattctggctgatacggcgggtcatccccatgaagcccagtgcgtacagcggcataaaggcaacgaagaaaccgatgatccagaaccagaatgcgcggataccccaggtctcattcagacggaagccgaaggatttagggaaccagtaggtcaggccagcgaagcaaccgaacaccacaccaccgataatcacgttatggaagtgggcaatcaggaacaggctgttgtgcagcacgaagttggcacccggtaccgccagcagcacgccggtcatcccaccgatggagaaggtgatgatgaagcccacggtccacagcatcgcggagttaagctgaatacggccttggtacatggtgaacagccagttgaagattttcaccccggtcgggatggaaatgatcatcgtggcaatcccgaagaaggcgttaacgttggcgcctgaccccatggtaaagaagtggtgcagccaaacgataaacgacaggacggtgatcgcgatggttgcccataccagtgaggtatagccgaacagacgtttcttcgagaaggtggcggtaacttcagagaagacaccgaacactggcagaaccaggatatacacctctgggtgaccccaggcccaaatcaggttgatgtacatcatcatgttgccgcccatatcattggtaaagaaatgggtgcccagatagcgatccagggtcagcaacgcgacggtgacggtcaggattgggaaggagacgatgatcagcacgttggtacacagtgctgcccaggtgaataccggcatcttcatcatcggcataccaggggcacgcatcttcaggatggtggcgaagaagttcacaccggtcaacagggtacccagaccggaaatctgcagactccagatccagtaatcgaccccgacgccagggctgtattccttacccgacaacggtggataggccaaccagccggtctgtgcgaattcaccgacacccagcgagatgttgatcaagaccacgccgaccacgaagaaccagaagctcagggagttcaggaacgggaaggcaacgtcgcgcgcaccgatttgcaacggaaccaccacgttcatcagacccaccacgaaaggcattgccatgaagaagatcatgatgacgccgtgcgcggtaaagatctggtcgtagtggtgcggcggcaggaatccggcctcaccggcagacgcgagcgcctgctggctacgcatcatgatggcatcagcaaaaccacgcagcagcatgaccatggccacgatgatgtacatgataccgatttttttatggtcgaccgaggtcagccattcgctccacagccacttccatttgccgaaatacgtgatcagcgccagcagggccagcccgccaacgatgattgcagcaacggtgaccatgatgatcggttcatgcaacggaaccgcatcaagtgttaattttcccaacatcagattattcctcggctccggcgtgagcatgttcactcatgtccataccctggctcatgtccatgccctggtgcgcggaagcttctgcgcctttgtgcatgtgcatatcacccatgaatttgccaatagtctctttgaacaaattcggtttgacactggagaagtactcaaccgggttgttttcactcggctctgccagtttgttaaaatcgctggtggcgttaagggtattagacgattctttcaccttggttacccactgatcgaagtcgccttcggtcggggtgacaatggcggtgaatttcatgccggagaacccgcggccactgaagctgctggaaataccatcgtatttgcccgcttcgttgccgatcaggtgcagtttggtctgcatcccggccatcgcataaatctgcccacctaactgaggaataaagaacgagttcattaccgagttagaggtgactttgaattcgactggaacatctttcgggaaagccaactcattaacggtcgcgataccctgctctgggtagatgaacagccatttccagtctaacgacaccacttcgatggtcattggctttttgtcggcgacaatcggcttgaatggatccagcgcgtgggttgttttccaggttatggtgccaaggatggcgatgataatgattggaatggtccagacgaccgcttcaatcttgttggagtgtgaccaattcggactgtacttggcgctcttgttggaagcacgatacttccaggcaaaggcaaatgccatgaagatcactggcaccacaacgatcagcatcaagccgattgccgtgaggatcagtcttcgttgctcaacacctattgctcctttgggatccatcaacaccatatcgcaaccgcttagcataacggtggcgacaattaaggataacatcccaatacttttattgtatttcttaagtctcatctaacgaccccaattaccaaggctctatattgtcgtttcatgtgtgcgggcattttacgggaaggttgcagtactgtaaacatacttaagagagtgtcagcggcttgttgacactttctgttaagggggtcacacatgtaacgttaggtgacaatttactaatggcaacaatgtgttggcgagctgaatcgttccgggggggatgctatgtcatggaaaaccaagggtatgtcaggatatcgcgtcagcggtggcgatgtttgaataggcgcaaaaaggtttatttaatgtaaaatttttgttttattgaggtgaattaaaatctatttccgagcgttttactcgggtaaaaaaatagctttggtaaaaatattaaatttttaacgaaataaattcgtttttctgatgcttttttgttggccgaattttatcggccaacaaaaaaatcacgctaattgcgttcggcgcaacgccaggtagtccaacaggctacccatgataatccccaccaggctcagcatggcaccggtttgcagcagctgcacggcgaggttgggccaatcggtccaatccagcgcgttggcgatcagcagcagcaaccatacgcctagcagcgagcaaccggcgcccagcaggcgtagtgcccagcgataggcggcacgaaactcagtgcgtggcataaagttgtcggtacgttgcgtgtactccaacgtctggcggcagattaacagcagcagcaggcctggaaccgccgccgcgatggagaacaggtaaaacagtggccagccatgagcggtcacgaaccaaccggcaattggcccgacgtaaacgcggccaacggcggagagcgccgagagcagggcaaactgggtggcggagaaggatttgttgcacagggtcatcagcagggcgacaaaggctgcggtgcccatgccgccacacaggttttccaggaaaatggcgctgcccatcgtcaggatgtttttagcggtgattgccaacagccagtaaccgatgttggataccgcctgcaaaatgccgaacagcatcagcgcccggaacaggctgagacgctgcatcaagacgccgccgaacagggccccgacgatggtggcaaacagaccgagggttttattcaccaggccgacctcgccggcatcgaagccgacgccgcggatcagaaaggtggtgcttaaactcccggcaaaagcgtcacccatcttatacatcacgatcagcaacaggatcagccaggcattgttacgggcgaagaagtcacgcagtggagcgactaccgccatctcgagggtgcgcggcgcaggaatgctgtcgtccggttccggtgccatcagcgtagcggctacgccaattagcatcagcccggccattagccagtaagtcgcctgccaaccgaaatagcgatcggccagccacagggccagcccgccggagaccagcattgccaggcgataacccagtaccgacactgcggccccggccccgcgttcttcggccgccagcagatcggttttgtaggcgtcaaaaacaatatcctgtgaggcagaacagaatgccaccaccaccgccagcgtggccagccaccatagatgctgtgacggattcataaaccccatcgccacgatggccactaccagcagcaactggctgatcaacaaccagccacgccgccgcccgaggaacgggggagtgtagcgatccataaacggagaccagaggaacttgaacacgtaggcctggcccaccagcgagaagataccgatggttttcagatcgaggccttcgacggtcatccaggcttgcagcgtgccggaggtcaatgccaacggcagccccgaggcaaagcccaacaccaacaggatgacggaattacgctgggtaaaaatattcagatactgtttcgacatgagatcccgatctgcgctgccctgtaaaccgagcagcgcgaggcattgcctgattaacgtgcgttttgcttgataaagtcgttgacgctggtgtcttgagccatatcggcgatgacgtcacccagcacggtgttgaccgcatcggtgattttttcattgctggcggtgaaggcaccctgcacgttataggtagaacggtagttcttcacctgcttgttgccgtttttggcctgcgcgatgattgaaatatccgctttggtggtgatgttgtagcgcaggttgccttgggaaacgtcggcaaacagcgtattcactacgatttgcaaatcaaccgcacctgatggcccaatcatataaccacgcgcgcccatttgcttttccagcacttcttgtagcaggaagcgcagatcgcgcgatggggtcagggtgatcagttggccgtcacggttcacttttgccagtgcctgatcggggcgttggtctgcaccgttaatgctgatagtgatcccttgcagggttgggtcctgctgtggcaacacgatcttcggggttacgttcagcgtattggtgctggtcgcacagccagctaacagcagtgcagccagcagaggaagacaaagtttttttaacattatgactgtctcatcaatcgtggttttatacccggtgctgttcaagcccgcgggcagggttgtgggtgcttgataatcaaagcgctagagtcaacgataaattgccgccatcatagcattgccaacaacgggtggaagtgttgaaggtggccgtagcgtaaatttttcctcaaccaggataaaaacaggctttttcgagtggctcaatcggataaacctcaactgagccacttttattgatgaatttttcggcattgtgtcgtgggatttacgatagccatgttctggcgggggcaaaaccgactaatattaaagtagaacctggtagcctgccggtgttgtaaggagatcctatgatccgcgagcaaatagaagcaaagttaagggcggcgtttgaacccgcgtatctggaagtgactgatgagagctatcggcataacgttcctgctggatccgaaagtcatttcaaggtggtgttggtgagcgaccgctttgtcggcgaacggttcctgacccggcatcgctccatttatggcgtgttggcggaagaactggaaaacggcgtacacgcgctggcactgcatacctataccctgaaagagtgggaaggactgcaggatacggtgccagcttcgccaccttgccgtggggcgggcacattagcttaatacctaaaatttacggtatcagtggaacttttacccgtatttaaggtattactactgacgaattttgcaacggcctgcgggccgttgctgtttttgacgacgacaaagccgaaggtgtttgcagctctgatggccatggcatcaaggtatttgggcgaaaaatcggcaaaagtgtgatttttaacgcgccagtgctgccttgccatcctcgactagctacgcttgcgccgctataatgtcgcgtctattttttccggaatggtttcggaacgctctcgacatcagggaactcggtttttaatgtagccgtcctggttcttggaacggagttgaccgagcactgtgatttttttgaggtaacaagatgcaagtttcagtagaaaccactcaaggccttgggcgccgtctctctattactgtacccgctgatgttatcaatcaggcagtaaagaaagagctgatcaacgcagctaaaagcgtacgtatcgacggtttccgtaaaggcaaagtgccgatgaacatcgtcgaacagcgttatggcgcctccgtccgtcaggacgtgctgggcgatttgatgcagcgcaactttgttgacgcgatcatcaaagagaaaatcaacccggccggtgcaccaaactacgtaccgggcgagtataaagaaggcgaagatttcgctttcaccgtggaattcgaagtctatccagaagttgagctgaaaggcctggaaagcatcgaggttgaaaaacctgtggttgaagttaacgacgccgatgtggataccatgctggaaaccctgcgtaagcagcaggcgacctggaaagacaccgacggcgcagccactgctgaagaccgcgtgaccgttgacttcaccggctctatcgacggtgaagagtttgaaggcggtaaagccgctgatttcgttctggctatgggccagggccgcatgatcccaggcttcgaagaaggtctggtgggtcataaagccggtgaagagttcaccatcgacgtcaacttcccagaagattaccacgcagaaaacctgaaagggaaagcggccaagttcgctatcgtgctgaagaaagttgaacagcgcgagctgccagaactgaccgaagagttcatcaagcgtttcggcgtggctgatggttctctcgccggtctgcgtaccgaagtgcgtaaaaacatggagcgcgaactgaaaggcgccgtgcgtaaccgcatcaagactcaggctatcgacggtctggtcaacgctaacgaaatcgacgtgccagcggcactgatcgacggcgaagtcgacgttctgcgtcgtcaggctgcacagcgttttggtggcaacgagaagcaagcgttggaactgccacgcgaactgttcgaagagcaagccaaacgtcgcgttgtggtcggtctgctgttgggcgaagtgatcagcaccaacgatctgaaagccgatgaagatcgcgttaagaccctgatcgaagaaatggcttccgcctacgaagatccgagcgaagttgttgagttctacagcaaaaacaaagagctgatgaacaacatgcgtaacgttgctctggaagaacaagcggtagaagccctgctggctaaagcgaaagtgactgaaaaagccactaccttcagcgagctgatgaaccagactcaacaagcgtaatgctggttgatgccaggagcgacctgatggcaggtcctttgccgtagctgggagttccttacaaggcccgtaactttggttacgggcttttcttttgccacgtgactgattaatctcggcttaactgtggcaatatgcactatatttattgggtcgaggacgaatggcggcggtggaaggccagtggttgtgaccttgcctgccacacagggatgttggtgaaattgttcaccgggcttgaaatgcgctctgtgaccccccaattcctacaacagtatgggccgctttatccgcctggcggaatgatagcgccgtcaaatcagtgtggagcctgtcgatggcttgaacgtagtcatgatggccgttctcaagtagaatcgacagacaatggcgccaaggcaatttctattaggagacggtaatgtcatacagtggcgaacgagaccaatttgcacctaacatggcactggtgccgatggtggtagagcagacttcgcgcggggagcgttcttacgatatttattcccgcctgctgaaagagcgcattatcttcctgaccggccaggttgaagatcatatggctaatctgatcgtggcacagatgttgttcctcgaggcagaaagcccagaaaaagacattttcctgtatatcaactcgccgggcggcgtgatcacggctggtatgtcaatctatgacaccatgcagtttatcaagccggacgtcagcaccatctgtatggggcaggcgtgttccatggggtcgttcctgctgacggcaggcaccaagggcaagcgtttctgcctgccaaactccagagtgatgatcccccagccgctgggcggctaccagggccaggcaacggatattgaaatccatgcgcgtgagatcctgaaggtgaaggctcgcatgaatgagttgatggcacaacataccggccaatcgctggaacagatcgaacgtgataccgaacgtgaccgcttcatgacggcggaagaatcggtagaatacggtctggtcgacagcattctgacgcaccgcagctaaaactatacccgaagggtcgcaagctgtagtgcatacctgttgcctgaaaggttatgggtagcgcgcggcttgcgggccgataggctatagtattcagagcgggcctggctcgctttaaacagcgttatcggcgttcccggtataaagtttgggcgcattgtcgccgcgtagtggtgcgggacaaagacaaaagaagaggtttgactcatgacagataagcgcaaagacggttcaggaaagctgctgtactgctctttctgcggcaaaagccagcatgaagtgcgtaagctgattgccggtccgtcagtgtatatctgcgatgaatgtgttgatctgtgtaacgacattattcgcgaagagattaaagaagttgcgccgcatcgcgagcgtaattcattgccgacaccgcacgaaattcgtcaccacctggacgattatgttatcggtcaggaacaggcgaaaaaagtgctggcggtggcggtctataaccactacaaacgcctgcgtaatggcgataccagcaatggcatcgaactgggtaaaagcaatattttgctgatcggcccaaccggtagcggcaagaccttgctggcagaaacgctggcacgtttcctggatgtgcctttcaccatggccgatgccacaacgttgaccgaagccggttacgtgggtgaggacgtggaaaacatcatccagaaactgttgcagaaatgcgactacgacgtgcaaaaagcccagcgtggcatcgtctatatcgatgaaattgataaaatttcacgtaagtcagacaacccgtccatcacccgtgacgtttcgggcgaaggcgtgcagcaggcgttgctgaagctgatcgaaggcacgattgcggcggttccaccacagggtgggcgtaaacatccgcagcaggaattcctgcaggtggacacctccaagatcctgtttatctgtggcggtgcgtttgccggcctggataaggtgattggccagcgcgttaacaccggttccggtatcggttttggtgccacggtgaagggtgaatctgaaaaagccaccgaaggcgaactgctgttgcaggcagagccggaagacttgatcaaatttggtctgatcccggagttcatcggtcgtctgccggtggttgccaccctcagcgaactgagtgaagaagcactgatccagatcctgaaagagccgaaaaacgccctgaccaagcagtatcaggcgttgttcaatctggaaggggtagatctggaattccgtgaggaagcgctgaacgccatcgccaagaaggccatgacgcgtaagaccggtgcccgtggcctgcgttcgattgtagaaggcgcgctgctggacaccatgtacgatctgccgtcgcttgaaagcgtagataaagtggtgatcgacgaatcggtgatcgctggccaatccaagccgttattgatttacggcaaaccggaagcgcaggcttctggcgaataattagccagtcaaaccagaaagttaatcgtaaaagggggattttatcccccttttctttttctcgacattgttaccgttgaatgtcagagattcatccccatatactcataatccagattttgtgaaacgtttgatgcttgcgtctcatgagatccccctaatcctggcggaaattaaactaagagagagctctatgaaccctgagcgttccgaacgcattgaaatccccgtgttgccattgcgcgacgtggtggtttatccgcacatggtgatcccgttgtttgttggccgggaaaaatcgattcggtgcctcgaagccgcaatggatcacgataaaaagatcatgctggtggcgcagaaagaggcctcgacggatgaacctggcattaacgatctgttctcggtaggtaccgttgcatcgattttacagatgctgaaactgccggacggcacggtcaaggtgctggtcgaaggtttacagcgtgcgcgtattaccacgctttccgacagcggtgaacacttcgctgcccaggctgaatatcttgaatcaccggctatcgacgagcgtgagcaggaagtcctggtgcgcacggcgatcaatcagtttgaaggttacatcaaactgaacaaaaaaattccaccggaggtgctgacttcattgaacagcatcgacgacgctgcacgcctggcggacaccatcgccgcgcatatgccgctgaaactcagcgacaagcagtcggtgctggagatgttcgatatcaccgagcgtcttgagtacctgatggcgatgatggagtcggaaatcgacctgctgcaggttgagaagcgcatccgtaaccgcgtcaagaaacagatggaaaagagccagcgcgagtactatctgaatgagcagatgaaggcgattcagaaagaactgggcgagatggacgacacgccggatgaacacgaggcgttgaagcgcaagattgaagcggccaaaatgccgaaagaagcgcgtgagaaaaccgaagcggaactgcaaaagctgaaaatgatgtcgccgatgtctgcggaagcgaccgtagtgcgtggctatatcgactggatgatccaggtgccgtggaatgcgcgcagcaaggtgaaaaaagacctgctcaaggcgcaggaagtgctcgataccgatcactacggcctggaacgcgtcaaagaccgcatccttgagtatcttgcagtgcagagccgcgtcagcaaaatcaagggcccaatcctgtgcctggtagggcctcctggcgtgggtaagacctcgctggggcagtcgatcgctcgtgcgaccggccgccaatatgtccgtatggcgctgggcggcgtacgtgacgaagcggagattcgcggtcaccgccggacttacatcggctccatgccgggtaaactgatccagaaaatggccaaggttggggtgaaaaacccgctgttcctgctcgatgagatcgacaagatgtcatccgacatgcgtggcgatccggcttcagccctgctggaagtgttggatccggaacagaacgtggcgtttaacgatcactatctggaagtggattacgatctgtccgacgtgatgttcgtggcgacctcgaactcgatgaacatcccggcaccgttgctggaccgtatggaagtgatccgtctttccggctacaccgaagacgaaaagctgaacattgccaaacagcacctgttgccaaagcagcttgaacgcaacgcgttgaagaaaggtgagttgacagtggatgacagtgccattatcggcattatccgttattacacccgtgaagccggggtgcgtagcctggagcgtgaaatttccaagctgtgccgtaaagcggtcaagtcgctgctgatggacaagaagctcaagcacatcgagatcaacggcgaaaacctcaaggactatctgggcgttcagcgtgttgattacggtcgtgcggacaccgaaaaccgcgtaggccaggtaaccgggctggcgtggacggaagtgggcggcgatctgctgaccattgaaaccgcctgcgtaccgggcaaaggcaagctgacctacaccggttctttgggtgaagtgatgcaggagtctatccaggctgcattgaccgtggtacgtgcacgtgcagagaagttgggcatcaacgccgacttctatgaaaaacgtgatatccacgtccatgtgccggaaggggcgacgccgaaagacggcccaagcgccggtattgccatgtgtaccgcgctggtttcctgcctgacaggcaacccggtgcgtgccgatgtggcaatgaccggtgagatcaccttgcgtggtcatgtgttgccgattggtggcctgaaagagaagctgctggcggcacaccgtggcggtatcaaaaccgtgctgatcccttacgagaacaagcgcgatttggaagagatcccggacaacgtcattgccgatctggagatccacccggtacagcgaatcgatgaagttttgaacatcgcactggtcaatccggccttcggcgcacagccggtagcggtaaaatagtgacgtatagcaaaaaccattgataaaactcatgctggcaagccaattcggacttgccagtatttttttgtgccgctaagttagatccctgtcggctcgcgtttcgtcgccgtttggtggcttgccaaggcacgacgggattgatataacagcagcgctgtcgtaaccgtagggattttttcggtgcgacgttttgaattctagaggggatgatagagtgaataagtcacaactgatcgacaaaattgccgcgggtgctgatatttctaaagcggcagcagggcgtgctttggacgcaattattgcttccgttaccgattccttgaaagaaggggatgacgtggctctggttggtttcggttctttcaccgtgcgtgagcgttcagctcgtaccggccgtaacccgcaaacgggtaaagagatcaaaatcgcggcagccaaagttccggctttccgtgcagggaaagccctgaaagacgcagtaaactgattacggcgtttaatcgcatcgcgtcgccggtaaacaatcacctgacgcagcggtattggtaaggtaagatataaggcgcatcaggttgatgcgctttttttatttttgtcgcagggaacgcgcctgcacaagggttgttaatccacatcacagcggagtgttgtcacactatgatggacaatttacgcgcggctgctaaccacgtcgtgctaaaaatcatcctggggctgattatcttgtcatttcttttgactggagtagtcagctatcagggaagtgccggcgattacgctgcgaaagtaaatggccaggtgatcgaacgcgcccagctggaacaggctttccagagtgaacgtagccgtatgcagcaggaactgggtgaccgtttctctgccatggctggcaacgaaggttacatgcagcagatgcgccagcaggtgctgtctcaactgatcgacaagtcgctgctggaccagtacgcgaagacgctgggcctgagcgccagtgacgatcaggtgaaagaggctatccgtcaagaagcctatttccagacggacggtaagttcgacaacgccaaatatctcgacctgattacccgttcgggctttagcgcagatcaatatgcgcaatacacgcgccagcggttaatcaaccagcagatgatccagggcttcggcggctccgacatcgtcccaccaagcgaagcagagtctatggttgctctggttctgcaagagcgcgatgtgcgcctggcgacgatcgatctcaatgccatgatggccaagcaaaccgtcaccgacgaagagctgaaggccttcttcgagcagaacaaaaacagcttcatcgcacccgagaaggtgaaagtgagctttatcccgctggatgccgcggcattgcaggataaagtgaccgttaccgaagcggatatcagcgcctattacgatgggcatcaaagcagctttggccagccggaacgcaaaaaattcagcgtgatccagctgaaaaccgaagcggatgccaaggcagtattggaagagctgaaaaacggtggtgatttcgctgcgttggcgaaagagaaatctaccgacatcatctcgcgccgtaccggtggcgaaatggactggatggagccagataccacggcagacgaactgaaacaggctaacctgaccgagaaaggccaactttctggcgtagtgaagtcttcagtgggttacctgatcgtgcgcctggacgatatcaagcctgcgctggtgaagccattgagcgaagtgcatgatgctatcgccaagcagatcaagcaggaaaaagcggtagatgcctactatgcgctgcagcagaaagtcagcgaagcggcgaccagcgataacgagtccctggcctcggcggaagaagctgcgggtgtcaaggcggctaacaccgaatggtttacccgtgactctgttcctgctgcgttgaacttcaagccggttgtgcaggccatcttcgatggttcgctgattggcgagaacggcgcgccaggcagcaactctgacgtcatcaccgttgacggtgatcgtgcgttcgtggttcgcgttgtggcccatcagccggaagggattgaacctttcgacaaggtgaaagatcgcgtaaccgcgatggtcaaacacaacaaggcactgcaagaagccaaactgcagggtgaaaaactgctggttgagttgaagcagggcaaaggcgatgaggcgatgaaagccgctggtctgagcttcggcagcgtacagaaaatggcacgcgccccggaagacagccaactggtggaagccgtattcgcactgccgcccccgcaagccggtaaagtggtttacggtatgtcacaggatgctcaagggaacgtggtgttgatcgccctggatagcgttaagccaggtacgttgccagcagacgaaatgaaaaccttcgtcagcaacatggagaaaggaagcgctagcgtgacctttgatgccttgctgactaatctgcgcaaagaagccaagatcaaaatgggtgccgctgagcaacaacagccgtaacttgtcccctatggatttcaagttgccgctaggcgacaagcttgtttatccccagaaacttacttttcgtcagtgactggggtgagcaagtgcaggtaacaacgctgcagcttgaaagacgacggggattcgcaccgcatttttttgcaacagcttgaaagactcaaaggccgctttcgcggccttttccacatttaaactctgccaattgccgatcttccgccgctgcggcaaggtaaccttgctgtcaaacacaaggaggatacagcatgcaacttagcgaaaataaagccattatccgttttaccgttatccgccagctactcctggcggcggcgctgtttggcctaatagggagctcagccattgccgcagagaaaccctctctggggcaaccacaggccgctgcggtatcgcctaaggtcagccttgaagcgcaaagcgagggggaaaccaaggtcagcattaaccaggcagatgcagaggcgttagccagcatgttgaacggcgtagggctgaaaaaggcggaggccatagtgcgctaccgcgaacagaacgggccgtttagtgaaatagaccagctacaagaggtgccggggatcggtccctccttggtggaaagaaatcgtgatcgactgaaaatgtgatcccgctcgcggctgcgtggcaaagtcccctcgcagccgcgctgctctgctacattttacaggtcataccagtcatccatcgcaaactctttgcccaagccctgcggtacaagcatgcggcctgcaaggagggatatcactgaacgggtatgccggtattaactcgctatcaccagagcaggagcggttgtttcactatgcagacttatatcaaagttcgtggctatcatcttgatgtctatcaacacgttaataatgcccggtatctggaattcctggaagaagcgcgctgggagtggctggaggatctggatgctttccactggatgacgcaaaacaacatcgcgtttatcgtggtgaacatcaatatcaattatcgtaagcccgccgtattgggggataagctgcgcatcgatagccagatgctgcaactcaatggcaagagcggcgtgctgagccagcaggtattgctggagcctgaggggaccgtggtcgccgacgcgacgttgacctttgtctgtattgatttgaaaacccagcgggcactgccgattgaaggtgcattgcgtgaacacctggtggcactacagcagaaagatgctgagggctgatgaagcatcgtgctcgtcatgccccctcaccctagccctctcccacaaggagaggggaccgaacgtgccagtggttatttctctcacaacctgaccatcggtaaatgaaaggggcggtgctacaggagtatctcagtacctgatggcaacacggtatcaactcannnnnnnnnnnnnnnnnnnnnnnnnnnnnnnnnnnttggatggcaacacggtatcaactcannnnnnnnnnnnnnnnnnnnnnnnnnnnnnnnnnnnnnnnnnnnnnnnnnnnnnnnnnnnnnnnnnnnnnnnnnnnnnnnnnnnnnnnnnnnnnnnnnttcatggaaggggggactcttgcctagatggcaacacnnnnnnnnnnnnnnnnnnnnnnnnnnnnnnnnnnnnnnnnnnnnnnnnnnnnnnnnnnnnnnnnnnnnnnnnnnnnnnnnnnnnnnnnnnnnnnnnnnnnnnnnnnnnnnnnnnnnnnnnnnnnnnnnnnnnnnactctttcctggatgacaacaccgtatcaannnnnnnnnnnnnnnnnnnnnnnnnnnnnnnnnnnnnnnnnnnnnnnnnnnnnnnnnnnnnnnnnnnnnnnnnnnnnnnnnnnnnnnnnnnnnnnnnngctcttgcctgaatgacaacggtgtaccagctccctctccctgtgggagagggttggggtgaggggacccaacgatggcttaatctgacttattgagcggcattgccgccgcccatgaattggcttaaaccaacccggttttccgcttcaggctggccatcacgccgaccttgtcctgctgatactgctgcaatccgttggcgcgcaggtggcaggccgcacattcaccgcagccgtcgccttgaacgccgttataacaggtgagcgtctcatggcggatgcgttccaactgctggtaataatccgccagcgcccaggtttcagccttgttgagccacatcagcggggtttcaaagcgaatatcacgggcaatccccagtacgatggcctgattcaaggccttgacaaactcgtcgcggcaatccggatagcccgagaaatcggtctcgcataccccggtgatcacggcttcggcttccacctggtaagcataaattgccgccagggtgaggaacaggatgttgcgccccggcacaaaagtgcttggtaaggcatcggtctgtgagctgtcgtaggtgggaaccgggatgttatcgcgagtcaaactgctgatggccagctcattgagcaacccaacgtccaaaaccttgtgtgccttggctcccagggtttggcatagggcctgggccacctcgatttcggcgcgatgacgctggccgtaatcgaacgtgatgcagtgaacttcatcatactgttgcaatgcctggatcaagcaggtcgtggagtcttgtccaccgctaaaaacgacgactgcgcgtttcataaatctaccttctggctagggccattcccgatgcacattcgggcggccggtttatgccctttgctgccaggctacagcttgactggccagagcctggcgctattgggcttcataacacacatgcggggatgctatcagaaatgttcgccacagcgtagggtaacctaatcatccagcggcggtggcagccaagcctggcaaaaatcaaaccagccgtaggcggtgagcatcacaccatgtatgcggggaggggcactgacctgatactgatagttgaataggggagtgaggattgcggctcccatcaactgttgataatacgcttttagctggctgaagcgctgctgcggtgctgggcattgctggatctgttgcagggtccgctgttggtgctgccaatcctcttctcgcaaaattccttgccacagcaaatcgcgacgtagccagctttccaacgtcgcttccggagcttcaccaatcaggttatcggccagcaacagatcggcttgggctatctgctcggtactttgccaacgtttgccggaataatagcggatctctaattggcagccatggtccgccagcaattgttgcaaagcctgagttacgctctctagttcgatcggtggatggtacaacagcgtcaactgaggtggcagttcaacgtcctgcaggacgtcatgctcagggatcgcccagcccggcagcatttcatgacttggtatgatcacgccctgctggatgggcaagctggccagcaggccggatcgctggatcagcatcagcagcttttgcccttgggcttcactcagtacgccacggcgctggttaatcgccaggtagcaccatccttggctcatactgcgttgtaccggccgtgccagtgccagttcttcctgttggccgatagtgatgcgtaccgggtgtaggcaactggtatcggtactgtgggttggtaactctggcgtgatccagtattcgatgctttccaaatagggatgttgcagatggtagtaaggatgttgttccagccgcaccatatgcggctcgtttagtgccagcttaaagggacctgcgccgagggtcggtaactctggatgtgtcatcaggcagggcagttctgccagccggtgcgccagccaataatcgggcatttgcagatcgaactggatgcatagtgcatgtggcaggctgattgttgccacgctgctcaataatggctgactgcgcggatggtgttgcagggcgttgagggtttgcaatagctgttggccggtcaaggcctcgccgttatgccagcgcagttgactgcgtagaaagaactgccaacgcaggccgtcttcgctaatctgccagtgatgggccagatcgggctgcggctcggggcaaccggtgttgaagcgcgtcaaaccggcataaacggttgcgaccagatgctgttccgcacggccgcttagcgtcaacggatcgagcttttccaacgtgcggtaataagggatacgcagcgtagggctgccttcctgccattggccgccgaggtgagggctcagcaactcttgcagatgctgtggcgccagctgcgccatttccaaggccccctgatgatcgcccagttgcagtaaacgttggagatgcgcagtccgcagttcatcgggggttttcaggcactgcagctgcgcgcgtttccccctcccagcctgtgattgccaacttagccaaccttgttgctgcaactgctgtaccagagtgcgtgcatgccgctcgctgcaatagaagatcgtagctaattcaccgatcgtgatcgccaccggcgtgctgcctagctggtggtacaaacgttgatactggctgaggcgatgaaccaggcgcatagcggtatcctagatgttgcaagcgatgaaagataaatcaggaagcgtttatacaaattgttcactattacttccgcaaataccaccccatactgcggtgattgccattgtgctcacatttacgaggttcctatgtatcgcctggccgctttcgatatggacggcaccctgctgactcccgatcaccgtatcgggccggaaacgctgagtgcgttaaggcagcttatcgacagggagatggtggtgacctttgccactgggcggcattaccttgatgctcagccgatcatggcgcaactgggattacaaggttatctgatcaccggtaatggcactcgcgtctatgaccagcaagggcagcaactgcatgctaccgacttaccggcggagattgccgaagaggtgttgcacacccactggcgtacctctgccagcatgcacgtgtttcgtgatgaaggttggttgaccgaaactgcggtgccggaaatgctggctgcacatcatctcagcggctttcatttccaactcgccgagttgcgccgtctgcctgcgcttggcaacagcaaggtctgtttctgtgccccccatgaagaactggtcaaactacaggcacagttgagtgagcatttcggcacccgtgccgatctgtgcttctcggcctatgattgcctcgaagtgctgccaaaggattgcaacaagggagcggcattggacaggctgagccgccatctggggctgacgttggctgattgtatggcctttggcgatgcgatgaatgataaggaaatgctcgcgggagtagggcacggcgtggtaatgggcaatgccctgccacagttgaaatcgttactgccccaactacaggttattggccactgcgaacagcaggcggtggctcactatttacaacattggctgcgttcaccacacctcacctattcccccgaattctgaggtattagcattacagccggccgggtatgactacccggctttttttatcccctgaacttcgccttaatgagttggcaacctaataagttatttacctgacaagttagccaactgagcgctatatggtgtcaaatcgccgatatggttgctgacccagtcgctgttgtaataggtatccagatagcgctcgccgctgtcgcatagcagggtgacgatggcaccttgctcgcctttatcccgcatctgcttggccagttgcagtgctccccatacgttggtcccggtagaggcgcctaccttacggccaagaatattttccagccaataaatggtggcgatactggcggcatctggcacgcgcaacatgttgtcgatcaccgaagggataaacgacggttcggcgcgtgggcggccaatcccttcgatgcggctgccacagctgccgatgatggtgcgatcgccatgatggaagcagtcgtagaacaccgagttttccggatcgaccacggtgagctgcgtatcatgaccttgatagcgaatatagcgccccagcgtcgccgaggtgccaccagtaccggcactcatcacgatgtgtttcggaaccgggtgcggttcacgctccatctggcggaaaatgctgtcggcgatgttgttgttaccacgccagtcggtggcgcgttcggcaaaggtgaactgatccatataatggccgttcagctctttggccaactcctctgacaccgcataaatctgggcggcatgatcgacaaaatggctgcggccaccgtaaaaggcgatttgctccaccttacgtttagccgtgcaggaaggcatcaccgcgataaacggcaggccgagcaggcgggcaaaataggcttccgataccgccgtgctgcccgaagaggcttcaataatcggcgtgttctggttgatccaaccgttacagagcccgtaaaggaacagcgaacgcgccaggcggtgtttaagactgccggtagggtgggtgctttcatctttcaggtaaagatagatgccgggaaattccggcaggttcaagcggatcaagtgcgtatcggcggagcgttggaaatccgcttctatttcaccaatagcatattttacccaagcgtttgtcatgatctggcctcaaaatagggtcttaatttatgcagtagcatagcggttcagcgagaaaaaaggattgccatttttcctgtttaatcgcctaatgggagaaatattttctatgaaatcaccttatgttggataaaactgaccgaaaactgctgtgcatgctgcaacaggactgtacgcaatcgctgcaagtgctggccgaagcggtgaatctgacctcaacgccctgctggaaacggctaaaaaggctggaagatgaaggttacattcgcgcacgcgtcgcgctgctggataatgaaaagctcgggcttggcctgacggcgtttgtgctgataaaaacccagcagcacagcagcgagtggtatcagaaatttgtcgatctcaccgcgcagatgccggaagtattggcgttttaccgtatggcgggggagtatgattacctgatgcaggtcgaggtggcggacatgaaaagctatgacaatttctataaacgcctggtgaccggcgtgccggggctgattgatgtcacttccagcttcgcgatggaaaaaatcaaatacaccacggcgctacccgtgccagagtgaaatcgtcactctactgttgaatgttaaggttgcagggctgcagccggtaatttgtcggatactgtctggaataaaactgcgtgagactctttgctcaaatcggctggtatttccgccgcgagtggcgccgctacctcggggccgtggtgctactgattgccattgccatattgcaactactgccgcccaagctggttggtatcattgttgatggcgtcaccaaggatcagatgtccaacaaggtactgatggcctggctggggttgatgattggtaccgccattgtggtttatctgttgcgctacgtgtggcgagtgctgttgtttggggcttcctaccagctggccgtcgaactgcgggaaaacttctatcgccaactcagccgtcagaacccggccttctatctgcgccaccgtaccggcgatttgatggccagagcgaccaatgacgtcgaccgcgtggtgtttgccgccggtgaaggcgtgctgacgctggtggactctctggtcatggggctggcggtgctgattgtgatgagcacccagatcagttggcaattgaccctgctttccctgatcccgatgccgatcatggcgatcgtcatcaaatattatggcgatcagctgcaccagcgtttcaagtcggcgcaggccgcgttctccagccttaacgatcaggcacaggagagcatgaccagcatccgtatgatcaaggcttttggcctggaggatcatcagtccaaccagtttgccgaagtggccgcgcaaaccggcgcgaagaatatgcacgtggcgcgaattgatgcgcgctttgatccgacgatttacatcgctatcggtgcggccaacctgctggcaatcggcggcggtagctggatggtggttaacggttccctcacgctgggccaactgaccagctttgtcatgtacctcggcctgatgatttggcctatgctggcactggcctggatgttcaacatcgtcgagcgcggcagtgccgcctatagccgtatccgcagcctgctggaagaggcgccggccgtgaaggatggtgagctcgatttgcccgccgggcgcggcaacctgagtgtcgaaatcaacgccttccattatccgcaaaccaacaaaccagcgctgcatgacgtggcgctacagctgcaaccggggcaaatgttggggttgtgtgggcctaccggctcgggcaaatcgacgctgctttcgttgatccagcgccaattcgatattgatgacggccatatcagctatcacggcttgccacttacccagatcaagctcgatgagtggcgttcacgcttgtcggtcgttagccagacgccgttcctgttctccgatagcgtggccaataatattgccttgggcaacccggcggccactcaggaacagattgaacaggcagcgcgcctggccagcgtacatgaagatattttgcgtttgcctcaaggttacgagaccgaggtgggtgaacgcggcgtgatgctttctggtggccagaaacagcgtatttccatcgcgcgggcgctactgttggaagcggaaattctgatcctcgacgatgctctctcggcggtggatgggcgcaccgaacaccagatcctgcataacctgcgcagttgggggcaaaaccgcacggtgatcatcagtgcacaccgcctttcggccttgacggaagccagcgaaatcctggtgatgcaacacggctcggtggtacagcgcggtcagcatgggcaattggctaccgagcctggttggtatcgcgacatgtatcgttatcagcaactggaagcggcgttggatgaggctcctgatagcaccgtggaggctttggccgatgagtaaaatacaaaacatgtggccaacgctgaaacgtttgctggcctatggttcgccatatcgtaaacccttgggattggcggtattgatgttgtgggtagcggcggcggcggaagtcgccgggccaattctgatcggctactttattgataactacgttgccaaagggctgttgccgctggtgattgtcagctccctggctgtggcttatatcctgctggaactgctcgctgcggcgttgcactatttccaggccattctgtttaatcgggtggcggtcggggtggtacagcggttgcgcaccgacgtgatggacgcggccctgcgccaaccgctgagcgcctttgatacccagcctgtcgggcaattgatctcgcgggtgaccaacgataccgaagtgatcaaagatctctatgtgatggtggtgtccacggtactgaaaagtgcggcactgatcggggcgatgctggtagcgatgttcagcctggactggcgtatggcgctggtggcgatctgcatctttccggcggtgctggtggtgatggggatctatcaatactacagcacgccgatcgtgcggcggatgcgtagctacctggcggatatcaacgacggcttcaacgaagtgatcagcggcatgggggtgatccagcagttccgccaacagatccgctttggtgagcgcatgagcgcggccagccgctcgcattataccgcccggatgcagacgctgcggctggatggtttcctgttgcggccgttgcttagcctgttctctgccctggtactatgcggcctgttgatgctgtttggcttcagcggcgaaggcgcgattggtgtgggggtgctgtatgccttcatcaattatcttggccgattgaacgaaccgttgattgagctgactgcccagcaatcgatattgcagcaggctgtagtggcaggtgagcgtattttcgaactgatggatcgcagccagcagagctatggcagtgacgatcgtccgctggcgagcggccgtatcgatgtcagcgacctgagctttgcctaccgcagcgacaaaaaagtgctgcagcacatctcgttgcaggttccgtcacggggttttgttgccctggtgggccataccggcagcggaaagagcaccctggctaacctgttgatgggctattacccgctgagcgaaggggaaatttgtctggatggtcgtccgttgtccagtctttcacatcgtaccctgcgccaaggcattgctatggtgcagcaagatccggtggtgatggcggaatcggtgctggcgaacgtcacgcttggtcgctctatcggtgaagaagcggtctggcaggcgctggaaacggtgcaactgggggaactggtacgtagcttcccacagggcatccatacacgcctgggggagcaggggaataacctgtccgtaggacagaagcagttgttggccttggcgcgcgtgctggtccaggcaccgcagatcctgatcctggatgaagcgaccgcaaacatcgactctggcaccgagcaagcgatccagcgtgccttacggttgatccgcgagcagacgacgctggtggtgatcgcccatcgcctttcaaccattgtggatgccgactctattctggtactgcatcgcggtcatgccgtagagcagggcaatcatcagcagctgttggcacagcagggccgctactaccagatgtatcagctacaactggtgggcgaagagttggctgccacggctcgcgacgaaactcagcccgcataacttcaagcaagggctccgctccaggagcccgcaccaccaacaggcaatagcacttttcaactccctcctactgcactttcccaacgcgtaatgcactaaaaaggtgcgcgatccccaggtggcgatctctgctttcgtccagagctagactctgattatgggttaaataaaataagtaattgaatttaaatgcaaaataatttgtggcacagcctttgctttatatgactcgtaccgggggtaagtttttgggcttaatcgtggagaggcaatatgaagctggttaccgtggtgatcaaaccattcaagttagaggacgtgcgtgaagccttatcctctgtaggtattcaggggctgaccgtaaccgaagtcaaaggctttggccgccagaagggtcatgccgagctctatcgcggggcagagtacagcgtcaatttcttacctaaggtcaaaattgatatcgctattgccgatgaccagctggatgaagtggttgatgtgattagcaaggcggcctacaccggcaagatcggtgacggcaaaattttcgttgccgaattgcaacgtgtgattcgaattcgtaccggcgaaaccgacgaagcggctctgtgatcgcaggctcagtcaactgaatggggatggattgataatgaaaagactgttatccacgttgggcctgagtttggtaaccctggttccttctttggctctggccgctccggcggtggcagataaggcggacaacgcctttatgatgatttgcaccgcgctggtgctgtttatgactttaccgggcgtggcgctgttttacggcggcctgctgcgctccaagaacgtcctctcaatgttgactcaggtgaccgtcacctttgccctggtgtgcgtgctgtgggtcatttacggctacagcctggcgttcagcgaaggtaacgctttcttcggtggcttccagacggtgatgctcaaagggatcgggatagacagcctgaccggcacctttagccagatgatccacgtggcgttccagtgctccttcgcctgtattaccgtggcgttggtggtgggcggctttgcagaacgcattcgcttctctgcggtggttatttttgccgccatctggttcacgatttcctacctgccgattgcgcatatggtttggggcggtggtttcctggcagctgacggcgcgttggactttgcgggcggtaccgtagtgcatatcaacgccgccagtgctggtctggtaggggcctatctgttgggtaaacgtgctggctatggcaaagaggccttcaagccacacaacctgccgatggtatttaccggagcctctatcctgtatatcggctggtttggcttcaacgccggttcggccagtgcggccaacggtattgcggcgctggcgttcctcaacacggtaatagccactgccggtgcaatcctctcctggacctttgccgagtgggtcgtgcgcggtaaaccttctctgctgggagcctgctcgggctgtatcgcgggtctggttgcgattacgccagcggcgggtaccgtgggtgtaggtggtgcgctgattattggcctggtaggcggtgttgcggggctatggggcgtggtaacgctgaagaaatggctgaaagtagacgacacctgcgatgtgtttggtgtgcacggggtgtgcggtatcgttggctgtctgttgaccggcgtctttaccgcttcatcactgggtggaacgggttacgccgctggcgtcaccatggggcatcaggtgtggatccagttgctgagcgttattgtgacgctggtgtggtcaagcgtggccgcgtttatcgcctttaaggtcgccggagccgtggtggggctgcgcgtaccggaagagcaggaacgcgaaggcctggatgtgaacagccacggtgagaatgcttacaaccagtaaaatacgttgaattaaactctgaaggggcgatggaaacatcgcccctttttcaattaaacatcgcgcttgcggatcacgccttcttgcaccgtcgtcgctaccagcacaccgtcgcgggtgtagaactggccgcgcacaaagccacgggcaccggaggctgaggtgctttctaccgcatacagcagccagtcgtccatgcggaacgggcggtggaaccacatggagtggtcaatggtggcaacctgcatgcccggctcgaggaaaccgacgccatgcggctgtagcgccgtcagcaggaagtggaagtcagaggcgtagccaagcagatactgatggatccgcaggtcgtccggcatggtgccattggcgcggaaccagacatggcgataaggctcttccacgctgcccttcaacgggttgtggaatttcaccgggcgcatttcgatcggcttcgggccaatgaacttgtcgcgcactttttccggcagcatatgcgacagtttttgtgcaatttctgactccgacatcaatccttccggcggtgggacatccggcatggtgttttgatgttcaaaaccctgctctgggctttggaaagaggctgtcatgtagaaaatgggtttgccattttgaatggcgctaacgcggcgcgcgctgaagctattgccgtcgcgcagggtttctacgtcataaacaatcggtttactgctatccccaggacgcaggaaatagctgtggaaggagtgaacgatacgctccgcaggaacggtttgcttggcagcatacagcgcctggccgaccacctgaccgccaaagacctggcgtaaccccagatcttcgctttggccacgaaataaaccttcttcaattttttccaaatccagcagttcgaggaggttgtgcagtgcctggctcataaagtggcgatccttttagtcatcatgttgcgcagtgtgctgaatatgatggcaggacgtcaatatattgcgttatttctgcggcggcagctgtcgcagtcagggcctttgtcatgaggccttagggctatttaggcctagtccgataggcagttgttagtattttgtgctaggtttaatcagtgtagtggtttaagccaccaacatgtgactaataataaaggagaccgacccatgaaactctggcaaatggtagggggagcagccgcattgacgatcacactggcaggctgtgcccacaagaatgcggatgtgccaacgcagacggctaacgctgcggcctcgcaaacgcagatccaaggcccggtggtgaagggctcagttaatattcgccagcgtatcgcgctgccaccggatgcggtactgaccgtgaccctgtccgatgcatcacttgctgatgccccttcacgagtgatttcacagcaggcgatgcgtaccgaaggtctgcagagcccgttccgctttacgctaccgtataaccctgcggacattcagcctaatgcgcgtatcatcctgagcgcggcgattacggtgaatggccagttgatgtttatcaccgacaccattcaggaagtgatcaaccgcaacgggacccaggccgatctgctattggtaccggtacaaaacgttccggttcaggtcgcacctaccccagctccgtaagcagcaatgcctgcatctgacagcctttgtgcctttggccaaaggctgttttttaccagtgccagccatacagttcaaaatcaaccgtgctctgcgggccgaaaataattccctctgccagtaacgcctgccgttggcgctgaaaatcttcaccctgctgtgagatttgcccgtggcggttaatgacccggtgccagggcagggtgctgccctctggtaaacgccgtaatacaccaccaacctgacgtgctgcacggggtgagccagccagtcgcgcaacttcgccgtaggtggttaccttgccaggaggaatggcggccacgatatggaatacgcgttggctgaaggtagcatcttctggttgcatggctgtttatcctgtgtgatgtgtggaaacgctgcatacagcaaaacgggcgcagcatacggcacccctacccattgagcaatatctccactgggtcatcaatattaactagtgtgccacaggcgagatgggtaagaaaacagcggttgctcccggttggcttgctatttgcttggccatcaccgataatgcccaccgcttcgcaattcaagaagccgtcaatgggggccctgttggttctcccgcaacactaactggtgaactcggtcagatccggaaggaagcagccgtagcgagtgacgtgtgtgccgggatgtagctggcagggtccccaccaatttctaactccccacctcctaaaaaagcaccgacaagccgccgatgccttacctatatgatgtttatgcctgggtttcccagcaggcaaccagcggatcgacgatctggcgcgttgtgccgtcggtcaggcccaaatccgtcaggtgcggcccggcattgcatgccaggcaggtgccctcaatcgccttgaacacccggtaggggggttcccagtctgcaaccttggcactcagatcgcgcaggtttttaaactgctctgccagctgtgcggcggggagatcggaaagcattccggcgatcggcatgtccacctgcgccaatatctcaccgttctggctaagagccatgccgccgccggtggcaattagcgcgttggcggccagcgccatgtcatgaggatcgcggcccagcaccaccaggttatgcgaatcatgagagtagctggtggcaattgccccccgtagttctccccaaccttccagcaatgccaactgaggcttggctgggtgccgggcgtggcgatgctgtacccaaatcagactgaaccccggcgggagctgtaccttgccgtcgcgcacttctaccgtagtttcattccattgggtgaaacgtgcccctttgatatggcgcaacgtggcctggccgtgacggatggccgcaacccgcatgatgaaatcatctgcggccaatggtgaaagatggagtgtgtcgcgtggtgcggatacgcctggcgtggcttgtactggagtcagcatttttccctgctctgccagacactggccagcaacgtaaacccgccgggcctggaggtgttccagggaatcaaagacgaccagatcggcgatccttcctgcggcaatcaggcccagatcgttacgttgcaagcgtatggcggcattgagcgtagccatccgtagtgcatcggtggccggtaatccatgttcaatcagcagattgagcagggcgataacgccgcctttctccagcagcatatcgggtggcacatcatcagtgcagagggtgatttgggaggagaagtgcggcagagattttaatgccgcaacaatttcaggcaacagataaggatgagagccccggatctccagcgtcagcccagagcgtagtttctccagagcatcggcagcagaggtcagctcatgatcggaggttacgcctgcagccagataggcttgcagctgcgggccgctcaaaccgcgcgcatggccttcaatcaattttccgctgttaagcccggcgttgaggatctcctgcatccgttcgctgccgtgcagcacgccgtgcatatccatcacttccgccacgccgccaacttcgggccaggctagcatggtatccatctcattaccgccaaagtcggcaccggacatttccagcccaggggtcgaaggcacgctggaaggtgcagcgcagatcacccgtagaggcagattgcggctggcatctaccgcgtagcgcactcccgcaacgccaagcacgttcgctagttcatgaggatcccagaaaatggtggtggtgccctgtgcgacgacgatctcggcatagcgttctggcagcagatgggagctctcaacgtgtacatgggtatcgatcagacctgggctgaggtaggctcccgccaggtcttgtgtccgatgtgccgttggcaaggcgccacaggggtgaacgctggcgatcagcgggccgacaatgccaatatcaaccaggcggatttcgcccgtgaccatgtcgatcaggttggcattggtcagcaagagatcaaacggcgtattgcccagcgcggcctgtacggcacgttggcgttcaccgttactgacagaaaaggtggtcatgataatccccggaataagagtaaggggttactgtaggtgggagcgtaagctttgcacagatgatttaatttattgtgcgataagaaacgtttatgctgtggcaaacgtttacctcttttcctggcaggttaggctatgtccgagccatggcgacggttacccgcgctatccctcaagcaaattcagtactttgtgaccctggcgcagctacgacatttcaccgataccgccagccgtctggcgatcagccaacccgcgttaagcagtgcgctgcggcaagtcgaaaccgtgcttggcgggaagttagtcaatcgaacggcctctgcggtgaccctgacggaactaggcacggcgatcctgccgcatgcgcagcggctgctgaatgtggctcacgctacctttgatgatatgcagcgcgtcatgttggccggaggggatggcacgttacgtatcggtctggtgccttcggtgagcaacctgctgtttcctgcggtaccgcgattgctggcgcaacatttcccgcgtttacgcgtagaattccacgatcaaaccaatgattccctgctactacagttggaaaatgggcagatagatttcggcattggggctttggacagctcggtgccagatcggcttgaaatttatccgttgcaggaagatccgtttgtggcggtgatgcatcgggacgatcctttggcggatccacatcatctgccctggcggcaattggctaacagggatattgcagtattttcgaaagggaatagcagtcgattggtgtcggcattggcggaaagccatcgtctgaacttaacggcgcgttatcaggtcgattttctggaaacgctgtatggtttggtgcggtcacaattagcggtggctattttgccgcagctttatacgacgcatttaaacgatgaagaattaaccgttgttcaattacaacagccattactgagccgcactgtggcacttatgcgcagcgcaaaacaaaatcactcgcctttaattgaaaactgtttccagttgctactgcacgatttccaactcagaggcaagtaaacttgcatttttaagataatacttaatctgaccggccattgaagccgataatattatcggctcaacgcaaggctactttgattatcttacaaatttccaaacggcgaccggaattttatcgtacagcttgttcatggtcagttcggccaggcgatgatcggcggcagagtagaacagctctagttcatcgtcagagagttcgtacttatttttctcgatcacgcgctcaagggtttcaatcgtggtgcatttacgcaaacgcatcagatagtcaatttttgtcatgataacctttagtcttattaaccataaaattatttgaggataattatcccctaagttttcatcgtggtacagacgccctctcctgagaacaatctgaatgtgcgtgccttggttttttgccagcgacgcaaatcggagtcattaataccgtaactgctaaacagcgtgtaggtatcgtcgaggtactcttcgaccagttccgataaatcaccttcgtccatgtatttaattttaaaactcattacaaacgaagcaatatgttcgatcagctcattaagctgcagattgacggcagacgttggatcgtttacccagccgtgatgactgtcacccaaggtggcgatgccttcgtcgtacaaattttcacataagaatttgagttgagcaatatcgtgccttttaggcgaatactcatccatatcatcccccgtcagtcttaatttcggtgttgataacactctgtgagtacattgacttaacatcatatgctgtaaagcgtagctcaggcttaataaactttcagcatattaaatataaatcattttttgccatctagcttgttactattaccgaaacttacaattcgtcagcggttgatggccgtgagttgtcgataacctcaaacaccaaacccttttccgtcagggtaaaagtgacagaatcatttatgtattcgtcaccactgatatccaggcatccgttaaaaatcgaccactgatagcggtaactcattgaatactcgctattactgatgcagttaatctcaatgatttctaatgagccttccacatagcgtgcattctcggagtaaaagcttagcccactggtgagcgccggtaccaagtcagataattgattaccgaccacttttcttaattgtttcacagaaagtgtgtctacttcgggacaacggcttagcgtcactagcatttggatatctggttgtatcatattctatgcctctatcttactccttttccagccttgatgggcaaacttttcactgaataacgcttttttacccagctttgagatttttaccgttcgatagttctgccgcccatccagcatcatcggttcgacagcctggagatgttacgttccgttgcattattcacacttgattgacttgagaatttccagtttgtgtgatgttatattattacattttagtgatctttttggcgataatcatgctgcctttccttcccgtaaccctgtttacctcagccgcggttttgcgctgcggtgccgttactctgttgctgatcctgctatggctagccattgcgtgggcggtggcactgccatgatgacgctgcaaaatgccatcgtgggttatgaccacactcctctgtttccaccgttatgcggtcattttatcgccggttcattaacggcggtgatcggcgttaacggcgccggtaaatctacgttattgaagtcgttggccgggttgcacccgctgttgggtggcaagctaaattttgcgggcgggaaggctccggcaatggcttatttgccacaactggcggagctggatcgtcaatttcctattctggttcaggatctggtcgccatgggctgctggccgcaaagcggcctgtttggcggtatgaataaatgctccaggcagcatattgccggtgccttagacaccgtcggcatgagttcaatggcccgtgaggcggtgggggagctatctggtgggcagctgcaacgcgtcctatttgcccgtttgttggtccagcaagcgccactgattttactggatgagcccttcaccggcatcgatacggcaaccactcagctgctgttgcgggtgattgcgcagttacaccgggagggaagaacggtgattgccgtattgcacgatatgtctaccgtagccaatcatttccccgaagcgctgttgctcacccccgaacgctgccattgggataacgccgaactagtgttggcgcattattcgaaggcggctaatcagaggggggccgcgtaatgacgctactccatctgctgctcgatccttttgtctctttcgggtttatgcgccgggcattggtagcctgcctggcaatatcgctgggtgccgcaccactaggagtgtttttattgctgcgccggatgagcctggtgggcgatgcgctttctcatgcggtattacccggtgcagcaatcggctatctgatttccggcatgtcgctggtagccatgggcgtagggggatttattgccgggttggctgtagccatgctgtccgggttggtgagccgcaaaaccccgttaaaagaggatgccagctttgcaggtttttatctggggtcgctggcgttgggcgtcacgctggtctctttacgcggatcgagcgttgatctgctgcacgtattgtttggctcgatcctggcggtggatgcgcaggcgctggttatggtcggcattatcaccagtatttcgctgatgatgctggccatgctgtatcgggctctggtgattgaatcctttgacagcacttttttacgcgtaagttcgccaggtttactggcgtggatccacgggctttttctcgccttggtggtgattaatctggtggccggttttcaaatccttggcaccctgatgtcggtggggctgatgatgctaccggcgacctgcgcccggttctgggcacgagatttgccgcagacattagccgtggctatcggaattgggctgctcgccagcctggttggtctggaatggtcctactacgcctcattacccgcaggcccggcaattgtcctcagcgccagcgtgatgtttttaatgtcgattttgtttgggacgcgtggcgggatgttgcgccgtgcgcgtcattgagaagtgctatctgcaaggagaaaacatgaaatctttacccataacgctggtggcagctgctctgttcgccagccccttagcgcaggcgaaaaccgttgaggccgtggccagtttttctattcttggcgatatcgtcaaacaggtgggaggtgaacatgtgaaggtcagcacgctggttggcccggatggcgatccgcacagttttgagccatcgccgcaagacagcaagcagttggcgcaggccgatgtggtgtttgtcagcggattggggcttgaaggttggatcgatcggttggtgaaggcttcaggttatcaggggccggtgatcaccgcatccagagggatcgcgtcgcgcagcatggaagaagagggcaaacaggtcaccgatccacacgcctggaacagtatgaacaatggcgtgcagtatgcgaccaacgtgatgaatgcgctgattgctgcggatcctgaagacgccgcctatttccgccaacgtggtggtgaatatattcaacaacttcggcagctcgatggttgggccaaagcccagttcgcggtggtgccacagcaaaaacgcaaggggctgaccagccatgatgctttcggttattttggccaagagtacggcgtcaccttccttgccccagtcggcttttctaccgaggctgaagccagcgccagcgatgtggccgggctgatcaagcagatcaggcaggaaaaggtcaatgcctactttattgagaaccaaacggatccgcgcttggtgaagcagatcgcggcggcaacaggggcgaaagcgggaggtgagttgtatcctgaagcactatccaaaccacaaggcccggcagccagctatgtgcaggcattcaaacacaacgtcgaggccattgttggcagcatgaagtaagtttaatccccaccgtgtgcggtggggttttccctttgcagtggcatttgccaataaaaaagccccgttgagcagcaacggggctttggctaccaatgacactttggcttaacgcttcttcttacgtccctgtaccgctttataacgcgggttggacttacaaatcacaaagacgcgaccatgacggcgcacaactttgcaatccggatggcgacccttcgccgaacgcagtgaactcaatacttgcatcatcaaccccgattattttctgctgttaaccaaatggccaaaccgctgctggaagcgcgcggtgctgccttcttttgagaactctttctgcttgccggtgtagtacggatgcgaagcggaagagacatctatggtgacgtagggccagcttttaccctcaagctcgatagtgcgatcggttttgatggtcgaccccaccttgaagaaggtatcggcgctgagatcgtgaaataccacggtgcggtagtctggatggatgcctgttttcatgatggcctcaaatgttatgttatactataacaataattatgcacctctctagggtcgggatcaacccccaaaatagcgctaatcagcgttgggcttattggctaaatagcagacataaaaaaggccgcttgcgcggccttggttttcagcaggaaagcatcagtgatgcttaaccggatgagcgtgttccagatcttcagtctttttgctgaagcggcggcgaaccaccacgaagaacaccggtacaaagaagatagccaagacggtagccgtcaccatcccgcccattacgccggtacctactgcgttctgagcgccggagcctgcgccgctgctgataaccagcggcataaccccgaggataaaggccagtgacgtcatcaggattggacgcagacgcatacgcaccgcttccaaggttgattcgaccagccctttaccttctttatccatcaggtccttggcgaactccacgatcaatatcgcgttcttcgccgacaacccaatagttgtcaacaggcctacctggaagtaaacgtcattttccagcccgcgcatggtcgcggccaacagggcaccgatgacgcccagaggcacaaccaacataacggagaacggaatcgaccagctctcatacagagcagccagacacaggaacaccacaatcagagagatggcgtacagtgacggtgcctggttaccggatagacgttcctgataggacataccggtccagtcatagccgacgccgtttggcagtttcgccgccagctgttccatcatgtccatcgcttcaccggtactcttacccggtgcagcctggccgaggatttccattgatggcagaccgttgtaacgttccagacgcggtgaaccgtattcccatttcgccgtggcgaaggcggagaacggaaccatctgtccggtgctaccacgcacataccagttattaatatcatccggcaacatacggaacggagcttcagcctgcacgtacactttcttcacacgaccgcggtcgataaagtcgttcacatacgagccgcccagtgcggtgccgagagtggtattaatatcgctcagggaaacgcccagtgtctgtgctttttcctgatcgatgatcagtttgaactgaggcgtgtcttccagaccgtttggacgcattccgaccagcatgtctggatgttctgccgccatgcccaacagctggttacgtgctgctgtcagtttttcgtgacccaggttagcctgatcgatcaactggaagtcgaagccggtcgccgtccccagttccacaatcgctggcaggttaaaggcaaataccaaaccgtctttaatctgcgagaaagctcccattgcacgggctgcaatagccggcaccttgttctcttcacctttacgctcagaccagtctttcaggctgacaaacgccaaaccggtattctgaccctggccgctgaagccgaagccgttaacggtgaacaccgagttaatgttattgccttctttctcgtggtagtagcggttaacttcgtccagaactttctgggtacgttcctgagtggcacccgctggcatttgtaccatggtcagcaggatgccctggtcttcgtccggcaggaacgaggaaggtaggcgcaggaacagaaacgccatgccgaccacgatcagcaggtagatcaccagataacgcccagtgctacgcagaatgttcgctacgctatcggtatagtgatgggtgctcttttcaaacaggcggttgaaccagccgaagaagccagtcttgatgccgtgatcgcctttcgggatcggtttgagcatggtggcacacagcgcaggcgtcaggatcaacgcgaccaataccgacagcaccatggcggaaacgatggtaatcgagaactggcgatagattgccccggttgacccaccgaagaaggccatcgggataaataccgctgacagcaccatggcgatacccaccaacgcgccctggatctgttccatcgatttcttggtggcttcttttggcggcaggccttcttcagccatgacacgctcgacgttttctaccaccacgatggcgtcatccaccagcaggcctatcgccagtaccatgccgaacatcgtcagggtatttatcgagaagccgaacgcagccaggatggcgaacgtccccagcaatactaccggcacggcgatcgtcgggatcagcgtagcgcggaagttctgcaagaacagatacatcaccaggaataccaggatgatcgcttcaatcagggtttttaccacttcgttaatggaaatcttaacgaacggtgtggtgtcataagggtaaacaactttcagacttgcagggaagaacggttccagtttggccagttctgccttgacttctgacgctgtgttcagggcgttggcaccggttgccagcttgataccgataccggcagcaggcttaccgttataacgggcaatgacgttgtagctctcaccgcccagttcaaccttggccacatcactcaggcgtacctgcgagccgtccggattgactttcagctggatcttgctgaattcctccggcgaggtcaggcgggtttgcgcgatgatcgaggcgttcagctgttggcctttcaccggtggagtaccaccgagctggcctgcagctacctggttgttctgaaccttgatcgcagcgataacatcgcccggggtcagttggaagttgttcagtttgttgggatcaagccagatacgcattgcgtactgggaaccgaacagttgaacgtcacccacaccagaggtacggctgataggatccttgatgttggaacctacatagtccgcgatatcctcttgcgtcatgctaccgtcttcggaaataaagcccgcgaccatcaggaagctgctgcttgatttctcaacgctgacgccctgttgctgcacttcttgcggcagcagcggcattgccagctgcagcttgttctgtacctgcacctgagcgatatcaggatcggtaccagagttgaaggtcaacgtaatctggacgttaccggacgagtcactgttggaggacatgtacagcaggttatcgataccgttcatattctgttcgataacctgcgtcacggtatcctgcaccgttttggcgtcagcgcccgggtagttggcggagatcgtgactgctggtggcgcaatggtcggatattgcgcaataggcagcttcatgatcgacaagatgcccgccaacatgatgatgatggcgattacccatgcaaatatggggcgatctataaagaacttagccatgtattaccggctcctttttatgacttcttctcgggttcagacgcagtctgtggcttgctatcagcttcttgcgctttcacctgaacgccaggtctgattttctgcaggccggaaacaatgacgcgatcgcccggtttcaaaccagccgtcaccaaccatttgtcaccaattgcctgcgcggcggtcagcgtacgcacttccactttatcgtccgcacctacaaccatcgcggtagcttcgccacgcgggttacgggtgacgccctgttgcggaaccagcaaggcatcggtacgcacgccttcgtccagacgggcgcgcacgaacatacctggcagcaaggcatcgttcgggttagggaaaatggcacgaatagtgatggaaccggtggtttcatcaacggtcacgtcggagaattccaacgagccttcttgcgcatattcctggccgttttccagcagcagcttcactttggctttgccgttttcctgtttcagggtgccgttagccaattcctgtttcaggcgcagataatcgttgcttgactgggtcacgtcgacatacatcggatccagttgctgcacggtagccagtgcattggcctgaccggaagtcaccagcgccccttcggttaccgatgaaaggccaatacgaccagagattggcgaagtcactttggtgtaagccaggttgatacgtgcggtttccactgcggccttggcagcgaccacggaagcgttagcctgcagcagggtggagttggcgttatcgaagtcttgcttactgatgtagctagtacccagtaaaggcttgtaacggttgaccgtcagacgcgcgatttctgccgcggcctgggctttggccagatcgcctttggcactgtcataggctgcttggtaggtcgctggatcgatttgatacagtgaaacacccgccttgatatcgctgccttcagtaaagttgcgtttcaggatgatgccactgacctgagggcgaacttcggcgatgcgatatgctgcggtacgaccaggaagatcggtagtaatgttgagaggttcagccttcaacgtcaccacacccacggcaggagcctggtgttgggcctgttgctgggtttctttatcattacatcctgtaagcactaagctgcctgaaagcatcagaactgccgccagaggcgttaaccctctgtttttgttcatagaaaaacctcaagtgtccgatttcaaattgatcaatggatcacaagctttaaaacccattgctgcgttaattttatctgcgtgctatggtacatacattcgcgaatgtatgtaaatcacaccgcccctaaaaaacaacatcatggcacgaaaaaccaaacagcaggcgcaagaaacacgacaacagatcctcgacgccgcagtgagggaattctccgagcgtggcgtttcggcaacatctttgactgatatcgcaaccgctgccggggttacgcgtggtgcaatttactggcacttcaaaaataaggtagacctgtttaatgaagtttgggagctctcagagtcgaaaataggggatctggagttagagtatcaggcaaagtatcctgataatccactgcgtattttaagagaaattctgatttatattctgaccgctacggtcgatgactgtcgacgccgggcattgatggagatcgtgttccataaatgcgaatttatcggcgaaatgatgccgttgcatgatgctcgcaaggtgctttatcttgaaggctatgagcgtatcgaacgtgttttacgcaacagtatggagcaggggcaactccctaccgatctgcatactcgccgggccgcaatcatcctgcgtgcttacatcaccggcctgatggagaactggctgtttatgccggaaagctttgatctcaaagccgaggcgagtatcttggtcgacagcttcctcgaaatggcgcagcttagcccttctttgcgtgtgaacgcgccagcccgctagacctcgataaggagaatcccaatgtcatctctgttactgattgccaacggtgcggcttatggccacgaatcgttgttcaatgcgctacgtctggccatcaccctgaaagaacagcagcccgagctgcagttgaagctgtttctgatgtccgatgcggtcgtggcgggcattgccgggcagcagccgcgtgaaggctatcatttgcagcagatgctggagattctgacggcgcagcaggtgccggtcaaactgtgcaaaacctgtgccgatgctcgtggcgtcagccaactgaagctggccgatggcgtagaaattggcacgctggtggagttggcccagtggacgctggcggcagagaaagtgctgactttctaatattgtaagtgactggggttaacgctcgcaggtaacaacgctgtagcttgaaagacgacggggatttgcggttcatcaactgcaacgcttttcttattcattgctgacctgcgatcgtgataaccttggcgcttcattgttaaaccgacgttaaatcatgagtcgcaggcgtattctccccgtagttcaaactctttccttgtcttacgctgcgggccaattccgcattattacgctatggtttttgttggcggcggtgctggttctgcctttgggctcgttcgctgcgcagagcggcgatctccccgcgcgtagcgatattcagagccagatagaaacgctgaacaagcaaaaaaatctgacgccggtcgaaaaacaatccttgcaggatttaacccgcacgatggagttgcttgatcgcctcgatcgcaccaggcaagagttcaatcagcttaaacagcaggttcagcaggcaccggccaaattacagcaggtcacgcgagatctggagtcgctgaagaaccctgctgatgaagcggtaacgcgagccgaattgctgccgctttccctgcgccagttggaaaaccgcctgtaccaaacgttggacgacctgcaggacacccaggaaagcctctcgacctacaacagccagctcatctcattacagacccagcccgaacgtgtgcagagcagtatgtacaccgcttcccagcgcttacaggaaatccgtaacctccttagcaatcgtgcgccggggcaagaggtattacgcaacacccagcaggtcatgctcaatacggagcaggtgttgctgaatgccgagatagacctgcaacgcagaagcctggaagccaataccacgctacaagatctactccagaagcagcgtgattataccaccatgaacatcgacgccctggaccaccgggtgcaggtattgcaggatgtggtaaacagcaaacggctgacactgtcggaaaagacggcgaaagaggcgcagaatccggaggatgccagcgatatccagagcgacaaactggtgagtaaagagctgaacatcaaccggcaaatcagccagcggctgatcaccgccacgcaagagagcaataccctgttccagcaaaatattcaggtaaaaaactggctcgatcgcggcctgcaatcggaacaaaacctgaaagagcagatccaggtgctgaagggcagcctggtgctatcacgcattctttatcagcagcagcaaaacctgccgccgggcacgctggtggcggatatgagcactcagatcgcggatttgcggctggagcagtttgagatcaaccagcagcgcgatgagttgttcaagggcgatgacttcatcaataaactggtggcggacagcaaggaaaaggccaacggtgacgtgcttgatgccttgagtgaaattgtcgacatgcgccgtgagctgctcgatcaactgaataagcagctcaataaccaactgtcgttggctatcaatctgcagattaatcaacagcaactgaccagcgtctacagctcggtacaggacacgctgacccagcagattttctgggttaacagtaataagcctatcgatttcgcttggctcaaggggctgcctggcgcggtgaaagaacaactggccgggctggattttaaattcgaacccggacagttgctgttgggcggactgcatgccctggtgttcctgatcccattgctggtagtgattggcctactgcgctggcgctaccgcctgattgacaggcatctgcaaaagctggccaatgatgtcggccagctaaagcgtgatagccaactgcatacgccgaaagccattctgctcaccttattaaaggtgttaccgggttctttactgctgctcggtgccgggttctggttctatcgggccgatttcagcatcagcgattttatctgggccttgtcacaacagttggcgctgttctggctggtatttggcttcactttccgcatgctggcccccgaaggtatttcacagaggcattttactatcccggccgatcgctgtgcgcactatcgtcgacagaccttcaggttgggtcttgccctgttaccactgatcttctggtcggttctgggtgaaaaatcgccgctgcgattggttgaggatgttattggccaggtggtggtgatcctgacgttagcgctattagcggtgctggtgttccccatctgccgcgaccattggcgtgaaaaagactcccataaagtacggttgctgatggtcaccgctctggctgccacgccggttatcctgctaggactgatgtttgccggttacttctataccacgttacgtttggctggccgttggatcgatagcctgtacctgtatttcctgtggaatatcgtttatctggcagcgatccgtggcctgagcgtcgcagctcgtcggttggcttaccgccgtgccctggcgcgccgccaaagcctggctaaagagaaagagggagccgaaggcaacgagccggtagaggagccccctctggcgctggatcaaatcaaccagcagtcgctgcgtttgactactatggtgctgttcctgatcttcgccagtgcgttttatgcgatatggtcggatctggtcacggtgatctcctacctcgacagcgttaccctatggcattactccagcagcgtggcgggcagtgtgatcccgcaggcggtgacgctgggtaacatgatggtggccgtcttggcggtgatcgttgcttacgtcatgacgcgtaacctgcccggtttgctggaagtactggtgttatctcgcctgcagctgcgacagggggcgtcttacgccatcaccaccattctgacctatctgatcacggcggtgggcaccatcaccgcattaggatcgctaggcgtctcttgggacaaactccagtggctggtggcggcgctgtcggtaggcttggggttcggtttacaggaaatctttgccaacttcgtttccggcctgattatcctgtttgaacgcccggtgcggatcggcgataccattaccatcggcacgtactccgggacggtcagcaagatccgtattcgcgcgaccaccattacggactttgaccgtaaagaagtgatcattcctaacaaagcgtttgtcaccgagcggctgattaactggtcactgtcagacaccattacccgtgtgctgattaaagtgggggtggcctatggctctgatctggacaaggtcaaggcggtgctgttgcaagcggcgcatgaaaacccgcgcgtgatgacggatcctgaaccgatggtctttttcctcaactttggcgccagcacgctggatcatgaactgcggttgtacgtgcgtgagctgcgcgatcgcagttataccgttgatgagctgaaccgggcgattgaccgcctatgccgtgagaacgatattaatatcgcctttaaccagttggaagtgtatctgcataaccagcagggtaacgaagtgcaggaggtcaaacgggcgcaggttccaggcatcggtgagcaacctgcggtgtaggaaccagatgataacgctagcgggccatgatcattggcccgtgggcaaatacggtgaggtgatgcccgcacgctgcatcttttcctgatagtcttttctgacaatgtccagcgcggccagcgccgttgccggatcgatctcgttgcattccagcaggtaaatcaagtctaccgccagttgtaattctggggaggcattctctagcgacataagtccaacgtttgtgtgagtaaagggatcttcccgtgttttaaacgcaggagagacgagattgtgctttggctgagtatagtgaacctggcgcggggaagggaataatcattaaaataatgtgacaaatattcaaaaaccgttttcttttcgctcgatactgcgctctatacgcgccaacgcttgccgacaacgcactaatctgccttcgaatgcggccagttcctgttgtaatttcttctgcgcggcgaaggtggtttgttgccctaaaagactttcgcggtcctggatcatggcgatcaggcggcgttcataatcctgatgttcggcgagcttgtggtacaaatcgaccaccgccacttccttcggctgatttttacgccgtatcgtctgggtcgccatttcgcgctgtaacgcggtgagctgcgccaccagcttttccgccagaaaggcgacgtgagcggtacggctgtcttttaccgccgtttgtagctgggcaaagttcttttgtatctcggccagataatctcgtaaccgcgtgccgtggttggagaacagggcaacgtcaaaccgcgcctgcgagatcggggtatcacctcgcggttggatttcgctggccagggcggcgatctgttgttcaagcgcctgtaataagcggtgcgtagtcacgtgagatccttcgataaggcagtaggtgcctaagcttgcccgtgaaagagagatgagacaagcttcggatggataaagccgccaactggcagcattatggccaaggatgctacagtaaacgggccatcacgataggtaaggacaggcatgactcgttggttgttgattatactgggttggttagccgtggtgctggcaacgttgggcgtggtgttgccactactgccaacgaccccatttctgttgttggctgcctggtgctttgcacgttcttcaccgcggtttcatcattggttgctgtatcgctcctggttcggttcttatttgcgccattggcaacagcataaggcgttaccgcccggagccaagtggaaagcggtgctggttattgtagtgacgtttgccgcttccctctggttggtgaacctttggtgggtgcgaggcgtactgctggctatcctggttattttgctgacctttatgctccggctgccagttattgccctgccgcaacaaaaacagcgctgatcgtgcggcgtcagttgcatttatccgccattttgcatagatttgggcgttttcgtgcgcaggtttcctcccgccgtatttttgttcaaggcgtggtagttgaaggcctgtgtggaagttatcaggtagttttatcaggcaataactatgaccgcgactgcgcaacagcttcagtatattagagacagtatcaaaaccattcccgactatccaaagccgggtattctgttccgtgatgtgaccagcctgttggaaaacccgctggcgtatgcttccagcattgaactgctggttgaacgttaccgcgatacgggcgtcaccaaggtggtgggtactgaagcgcgtggtttcctgttcggcgcaccggtggcgttggcgctgggcgttggctttgtgccggtacgcaaaccgggcaaattgccgcgtgcgacgctgagcgaaagctatgagctggaatacggcaccgacaagctggaaattcacaccgatgccatcgttgctggcgacaaagtactggtcgttgacgatttgctggccacaggtggcacgatcgaagccaccgctacgctgatccgccgtttgggtggtgaagtgacagacgcggcattcatcatcaacctgccggacctcgggggcgaaacgcgcctgaataatctgggtatcaattgctactgcctgctcgatttcgccgggcattgatagcttggatagacaaccccgtggttcgctgcggggttgacgtataaccacgacttccccgtattctccgctgtattctatcctcatcaatttgccaaggttctggctcgcggcaacatttttaaccctcggcctcatatgataaagtccattcaggcatggttgaaaagtgagcgattatgaaaaaaaacagcaaactcaatttacacgatgcggtattcaaacagtttctaatgcacccagggacagcacaggatttcctagaaatccatctgccaggagaactacgcaagatttgcgacctcagcactctgaagcttgaatccggttcttttgttgaggacgatctacgccagtatttcagtgatgttctctatagcctgaaaaccacggcgggcgatgggtacattcatgtgcttatcgaacatcagtcaacgccagatcaacatatggccttcaggctgctgcgttacgccattgccgccatgcagcgtcatcttgccgccgggcacaaaaagctaccactggttattcctatactgttctacactggcaaacgtagcccgtacccgtattcaaccaactggctgcaggagtttgacgctcctgagctggcgaaaaaaatctacggtgccgattttcctgtggtggatgtcacggtcattcccgatgatgaaattatgaatcaccgcagcatggccgcactgacgctgttgcagaaacatatccaccaacgcgacatcacagagctgactgaccggttagcgaccatcctgctggcgggatatctttcttcgcaacaggtaatatcgttgatacactatttagtacaggctggcgaaaccgccgacgcagaagcctttgtacgcgagctggcacaacgagtacccgaacacggagacgaactaatgactattgcacaacagctggagcagaaagggatcgagaaaggcgttcagattggcgtcgagaaaggccgcgaagaaggcgttctgcagggtaagctggacgtagcccgtagcctgctcaaaatgggcatggctcgtgaggccgtgcttgaggcaacgggtttgaccgaagacgagctggcccagatccgccactaaagctttaacggctggcgttcgttggccgttccacctggtatcgcgatggccttattttcaggggcaaccggttactgcatggttagctaaaactgcaaaaagccagtttcagacggcagataaagccccatcgatagctcttcattgtcaaacacagtataaattctttcaggcggttaaccttcaccaaggtgtttccctgtcattgactggccaccaggctcgcgtctggcaggcatgatgcaaagttataggaatgacggcgggcgtactgttacactaaagtgtgcgtggccatcggacgataaagggtatcggttcaacctcggtactcagcaggccgcccacatggcaatgtcctcgacgttgtgatgtactacttgggttgaaattactccataaatcagtgatgaagtcttaatgagctatcaggttcttgcccgtaagtggcgcccccaaacgtttgcagaggttgtcggacaagagcatgtcctgactgcgctggctaatggcctctctctggggcggatccatcacgcctatctgttctccggcacacgcggcgtgggtaaaaccaccattgcgcggctgctggccaaaggtttgaactgcgaaacaggcatcaccgcgacgccctgtggccaatgtgataactgtcgtgagattgagcaggggcgctttgtcgatctgatcgagatcgatgccgcctccagaaccaaagtggaagatactcgcgatctgctcgataacgtgcaatacgccccggcgcgcggccgtttcaaggtctacctgatcgatgaagtccacatgctctcgcgccacagcttcaatgcgttgctgaaaacgctggaagagccgcctgcgcacgtcaagttcctattggcaaccaccgatccgcagaagctgccggtcactattctttcccgctgcctgcaattccatcttaaagcgatggacgtggaacagatccgcacgcagttggaaaccgtcttgctggcagagcacatcaccagcgatgcccgcgcgttgcaactgctggcgcgcgccgccgatggcagtatgcgtgatgccctcagcctgaccgaccaggcgattgccatggggcaagggcaggtgacgaccgacaccgtcagccagatgctggggacgttggatgatgagcagccgctggccatcctggaagccctggtgagtgccgacggcgaaaaagtgatggcgcaggtcgcccaggcagcgtcacgcggtgtggattgggaaaacctgctggtggaaacgctggcgctgctgcaccgcattgcgatggtgcaactgctgcctgcggtgctggataaccattacgctgcgattgagcagcggttacgtgagctggcgcgcaccctgccgccaacggacgtacagctttactaccaaaccttgctggttggccgcaaagagctggcctatgccccggatcgccgtatgggcgttgagatgaccctgctacgcgcgctggcgtttcacccaaaagcggtgatcccagagccggtggccatggtgcagatcgcgccggtgcagccgcaggggaatatggccgttgcgccaccttctgcctatccagatgccccgccccccttagggcaggctgcacagccgcagaatactcaaccaacaaatttaccggatgctaccgcgcagctacttaaagcgcgaacccagttgctgcggcaacagggggcatccaccgcaaaaaagaatgagccggcggcgccaggaatagcgcggccggctaactcggcactagagcgtttagcctcggtaaccgaacgcagccagaagcgtcaggccgaaaagatcgtgacggagaaaccggccaagccggaggcttatcgctggcgcgcgcttaccgaacctgaagccgcgccggaaccgctggccacgccaaaagcgttgcgtacggcgctcgaacatgaaaaaacgcctgagctgtcggctaaactggtggttgagtccatcgagcgcgatccttgggcggcagagatagaccagctaaaaataccgaaactggtgcagcaactggcgttaaacgcctttaagcaacagctggcaccggacagcatttgtctccacctgcggtcttcgcagcgtcatctgaactcgccttcggcgcagaagacgcttgcgcaggcactcagtgagttacatggccgcacggttgaactcagcgtggtggaagacgataatccggcggagcggactccgctggagtggcggcaagccatttatgaagaaaaactggcacaggctcgccagtccatcgttgcggataccaatatccagaccctgcgtcggttcttcgatgcagatctggatgaagagagtattcgccctatttaacgcggcgcacagtgcgcggccaatgctatgagagacgactatgtttggtaaaggcggtatgggtaatctgatgaagcaagcccagcaaatgcaggaaaagatgcagcagatgcaggaagaaattgccaaattggaagtgactggtgaatccggcgcaggcctggtgaaagtgaccatcaacggggcgcataactgccgccgggtagaaatcgacccaagcctgatggaagacgacaaagagatgctggaagatctgattgctgctgctttcaatgacgcagcacgtcgcatcgaagaaacccagaaagagaagatggcgtcggtttccagcgggatgcagttgccgccaggctttaagatgccgttctgatgcaaaccagcccgctccttgaatcattgatggaggctctgcgctgcctgccgggcgttggcccgaagtcggcgcagcgtatggcgttccaactgctgcagcgcgatcgcagcggcgggatgcggttggcacaggcgctgacccgtgccatgtcggagatcggccactgtgccgattgccgtaccttcaccgagcaggatacctgcaccatctgcaataatgtgcgccgccagcaaaacggccagatttgcgtagtggagagcccggcggatattcacgccattgagcagaccggccagtttgccgggcgctactttgtgctgatgggccatctgtcaccgttagacggcattggcccaggcgatatcggcctggaccggctggagcaacggctggagaaggaaaccatcaccgaagtgatcctggccaccaacccgacggtggaaggggatgctacggccaactacatcgccgagatgtgtggccaatatggcgtacttgccagccgcattgctcacggggtcccggtgggtggtgaactggaaatggtggatggcaccacgctgtcgcactccctggccggacgccacgcgatcaaattctgatgattctgtacggggcagccctctgccccgtaattcagttgacaaaaaattccccgccagccgcttgaaaaaccacagagttaaccccatctgatcctcattgcatgatttggtcactactgtctttgaggtaatcaatgagtatgaaaggtcaagaaacccgtgggttccagtctgaagtcaaacaactgcttcatttgatgatccattcgctgtactccaataaagaaatcttcctgcgtgagctgatctccaacgcctccgatgcggcagacaagctgcgtttccgcgcgctttccaagcctgagctgtatgaaggtgatggtgaactacgcgtgcgtctgtctttcgacaaagagaagcgcaccctgacgattgccgataacggcatcggtatgagccgcgaagaagtgatcgaaaacctggggacgattgccaaatctggtaccaaggccttcctggagtctatcggctcagaccaggctaaagacagccaactgatcggtcagttcggcgtgggcttctactcagcgttcatcgtggcggacaaagtcaccgtacgtacccgcgcggccggtgctgcggaagatcaaggggtgtactgggagtctgccggtgaaggtgattacactatcgccgatatcagcaaggccgatcgcggcagcgaaattaccctgcacctgcgtgaaggcgaagacgaatacctcgacggctggcgtctgcgctcggtgattggcaaatattccgatcacattgcgctgccggtagagatcgaaaccaagaatgaagaagacggcaccgtcacctgggagaaaatcaacaaggcgcaagcgttgtggactcgcaacaaagctgacgtgagcgaagaagagtacaaagagttctacaagcatattgcccatgactttaccgatccgctgagctggagccacaaccgggtggaaggtaagcaggagtacaccagcctgctgtacatcccggcccaggcaccgtgggatatgtggaatcgcgatcacaaacacggcctgaagctgtacgttcagcgcgtgtttatcatggatgacgccgagcagttcatgccgaactacctgcgctttgtgcgtggcctgatcgattccaacgatttgccgctgaacgtttcgcgtgaaatcctgcaggacagccgtgttacccagaacctgcgtggcgcgctgaccaaacgtgtgttgcagatgctggacaagctggcgaaagacgatgcggaagcctaccagaagttctggcagcagttcggtatggtactgaaagaagggcctgcggaggacggcggcaacaaagaagccatcgccaaactgctgcgctttgcttctacgcacaatgacagctcggcgcaaaccgtctcgctggaagagtacgtcagccgcatgaccgaaggccaggacaagatttactacatcactgccgacagttatgccgccgccaagagcagcccgcacctggagctgttccgcaagaaaggcatcgaagtcctgctgctgtctgaccgtatcgatgagtggatgatgagctacctgaccgaatttgacggtaaggtgttccagtcggtcagcaaagcggatgaagcgctggataaactggcggatgaaaccgaagagcagaaagaagccgagaagcagctggagccgtttatcgagcgggtcaagacgctgctgggtgagcgcgtgaaggacgtgcgtctgacgcatcgtctgaccgataccccggccatcgtcaccaccgatgccgacgagatgagcacccagatggccaaactgtttgccgctgcggggcaagctgcgccggaagtgaagtatatcttcgagctgaacccagagcatgcgttggtcaaacgcgcatccgatgtgggcgataacgaacaatttgccgaatggatcgatctgctgttggatcaggccctgctggccgagcgtgggacgctggaagatccaaaccagtttatccgccgcatgaataagctgttgtccgcttaatcagcaaaatacgccccagaccttagagtttggggcgtaatctcttctattccggttaaattttctcgctgcttgcctcgtttcagcccgatctttccgcaaccgatttcctctcgctaccttgagccacccccctcagaaatggtaaggttgagtgttttcgaaatttaataaaaactcaaacccgatagacttccggccgcggcccgaagaatgaagggaaatacatagcaaggggatttacgcaatgcgtatcattctgctgggcgctccaggcgctggtaaaggcactcaggctcaattcatcatggagaaatacggcattccgcaaatctccacgggcgatatgttgcgcgcagccgttaaggccggttctgagctgggcaaaaaggcgaaagaaatcatggacgccggcaagctggtgaccgatgagctggttattgcgctggtcaaagagcgtattacccaggaagactgccgtaacggtttcctgctggacggtttcccacgcaccattccacaggccgatgcgatgaaagaagccggcattaaagtggattacgtgctggagttcgacgtgcctgacgaactgatcgtcgatcgtatcgttggccgccgcgtgcatgcgccatctggccgcgtgtaccacatcaaattcaatccgccgaaggtggaagggaaagatgacaccactggcgaagagctgaccacccgtaaagacgatcaggaagagaccgtgcgtaagcgcctggtggaataccatcagatgaccgcaccgctggtgtcttactatcataaagaagccgaggcgggcaatacgtcctaccacaagatcgatggcacccgtaaggtgacggaagtgagcgctgagctggcgaccattctgggctaattggtgtcaaggctgtagaaaacgctgggcttgctgttgctgcccggcgtttttttttgccgcttcatgctaggttatcagtgctaccgtttcgcccgacaggaaaagccgcatgcccaggcagacaaattttttgcaagaagcgaccgcgcgtcagatcgtgcaacgcgcgatgagcatcattcaccattcggtcaacgtgatggacagcaacggcgtcattattgcctccggtaacgcctcacgcctgtatcagcgccatgaaggagcggtattggctctgaccgaaaaccgggtggtggagattgatgaggcaacggcacagcatctgaagggggtgcaacccggcatcaatctcccattcagtttccgcaatcaactggtcggcgcgataggggtttccggcgatccggctcaggtgcgagcctatggtgaactggtgaaaatggcggcggagctgatggtggaacaggccgcgatgctcgatcaacatcagtgggagaagcgttaccgggaagagctggccaatcaactgctgcaagggcacagtgaacccggttcgcgcgaggcgatggcggcctatttagagctggatctgcaacagccacgcattgtctggctgcttgagctgtatgagccgcagccgcaggcactgagaggcttgttggcagagctggagatcacccagcgtgaggcgcttatcaccatgaccagctttaatgaactggtgctcttgcgcccggcctgtatgagacagggcgtgtgggacgtgcagcaggaacgcaagcttgcccagcaactccagcatgagatccagcaacgctttggcctgcggttgatcgtcgggggtttttacagtggtgatgagggcgtttaccgctccattcagaccgcgcgtgcagtgcaaactatggcgcaccgccttaagttaccccagcatacgttattttatgatgactacccgctgccctctctgttgtgtgatttgggggaggattggcgagcgcaggagctatcccggccctggcagcaattgagcgcccaggatgagaaagggatgctgagaaacacgctgcgccactatttcaatcagaattgtgaccaaaccaagactgcggcacagctgcatattcacgttaacactctgcgttaccgcctacagcgcgtagaaaaaacgactggcctgaagatcaatcaattggcggacgtcttgcaactgtatatcggtatgttgatgcaggattgaattgtgtgaatgcacaaaataacgttattttttacccttttgtttgtgtctatcgctaaagaatttccgttgtcggcagggtatggtattcactaaccgatgcagtggcatcctctgaagattaaggcactgtcgatgaacaccctacagaaagtggtaattgcccccgactcctttaaagagagcctgagtgctcagggtgtcgcagaagcgatcgagcgtggtttccggcaaatctatccgcaggcgcactatgtgttgctgcccatggcggacggaggcgagggcaccgtcgatgcgatggtggccgccaccggtggggaaatcatcaatgtgcaggtgagcgggccgcagggcaaacctaccgcagcgttttatggcctgctgggggaagggaaaaccgcagttatcgaaatggcggccgcgtccgggctgcctctggtggcgggggacgaacgcgatccgttagtgaccaccagctttggcaccggtgagctgatcctggcggcactgcaacaaggtgtagactcgatcattttggggatcggcggcagcgcaaccaacgatggtggggcgggcatgatgcaggcgctgggcgctaagctactcgaccatcataatcaagaattacggcccggtggcgcggcgttggcgcaactggcgcatatcgatcttagccaattggatccccgcttgcagcaggtgaagattacggtagcctgtgatgtggataacccgctgtgtggcgatcacggggcttcagcaatcttcggcccacagaaaggggctacgccggagaaggtgcagcaactggacaaggcgctgcatcattacggcacgctcctggagcagagcaccgggcgcaaggtattgcaggtgcctggctcaggcgcggcagggggcatgggagcggcattgatcggttttctggccgctgaactgcggccaggcatcgaaatcgtgatcgaaacgctgcatctggaagacgcggtacgtaatgctgacctggtgatcacgggtgaagggcggctcgacagccagtcgatccacggcaaaaccccgatcggcgttgcgcgggtagccaagcgccaccaattaccggtgattgccatcgccggtagcctgtcaaaagactatcaggtggtgcatcaacacggcatcgacgccgctttctcggtgatcgaccgcatcgtgacgctgccagaggcgctggcggacgcggcccataacctggaagtcacggcgcgtaacgtagccgccgtctggcaactggcgcaaaaataatccccgttctacctgttattgatataggttccggtccggcgcttttccgttacaataggccgcatgagtggctgttaatacgctgagaaataacagggtatttgccgggaaggacaaggggatcggaatgaaacaagagaaacacggggtattgctggtgaatctgggtacgccagaggcacccaccccgcaggcggtaaaacgctatctgaaagaatttctcagtgacaaccgggtggtcgatactgccccgctgatctggtggccaattcttaacggcatcattctgccgatccgttcaccgcgtgtggcaaagctttatcaatccgtctggatggaagaaggttcaccgttgctggtctatagccgccgccaacagcgggagctggcggcgcgtatgccaaataccccggtagaactgggcatgagctacggttcacccagcctggcacaggcgatcgacagcctattggcgcagggcgtgaccaatctggtggtgttgccgctgtatccgcaatactcgtgttcgactagcgcagcggtctgggatggtgtggcgcgggtgctgaaaggctatcgccgcctgccatcgattggctttatccgtgactatgccgagcacccagcgtatatcctggctttgcagcaaagcgttgagcggtcgttcgctgaacacggtaagcccgatcgcctggtgatgtcgttccacggtattcccaaacgctacgccactctgggtgatgattacccgcaacgttgcgaagatacctaccgcgcgttggcggcggccatacctctggccccagatcgggtgatgatgacctatcaatcgcgttttggccgggagccctggctgacgccgtacaccgacgaaaccctgaagagcctgccagcgcaaggggtgaagcatatccaactgatctgccccggtttttctgcggattgcctggaaacgctggaggagatcaaagagcagaaccgcgaaattttcctggaggcggggggcgagaagtttgaatacatcccggcacttaatgatgacgccgcccatatcgatatgatgcaacagctggtggggcaacggctgtaatcaagccggcttttcaccgctcggctagcaaaatgctcacgtgaaagcgcagcaatcaggcgggaatgtgctaacattcctgcctgttcaccgcaactcaccgccaatcacatgaaatttcctggtaaacgtaaatccaaacattattttccggtcaacgctcgcgatccgttattgcagcagacacagcctgaaaatgaagtcagtacctcttatgtcgtcggtatcgatcagacgctggtagatatcgaagctaaagtggatgatgcgtttgttgaacgctacggccttagcctgggccattcgctggtcattgaagacgacgttgccgaggcgctgtatcaggaactgagcgacaacaacctgatcactcatcaatttgccggtggcaccatcggtaacaccctgcacaactactcggtactggcggacgatcgttccgtgctgctcggcgtgatgtgcagcaacgtcaaaattggcagctatgcctatcgctatctgtgcaacacctccagtcgtaccgatctcaactatctgcaagcagtggatggggccattggccgctgctttacgctgattagcgagagcggcgagcgcacctttgccatcagcccggggcagatgaaccagctacgcccggaaagcattcctgaagaagtgatcgcaggggctgccgcgttggtactgacctcctatctggtgcgttgcaaacccggtgagccaatgccggaagccaccatgcaggcgatcgcgtttgccaaaaagcatgatgtaccggtggtgctgacgctgggcaccaagtatgtcattgcggataacccggtgtggtggcgtgattttctcagggaacatgtttccattctggcgatgaatgaagatgaggcattggaactcacagggttgagcgatccgctgatggcctcagagatggcattggactgggtagatttggtgctgtgtaccgctgggccaaacggtctgtacatggcaggctacaccgaagaggccaacaagcgtgaaactcagcatccgctgttgccgggccatatcgccgagtttaaccgcttcgaattcagccgtgcgatgcgccgtgcaagctgcgaaaacgcgctcaaggtctattcgcatatcgccccgtatatgggcggcccggaaaagatcatgaataccaacggtgcgggcgacggtgcgttgtctgcgctgcttcatgatatcgccgctaacggctatcaccgtaacaacgtaccaaactccagcaagcatgtgcgtagctacctgacctattcttcattggcgcaggtctgcaaatatgccaaccgcgttagctatcaggtgcttaaccagcactcgccacgtttgacccgtgggttgccggagcgggaagacagtttggaagagtcttactgggaacggtaacgagtagcggataggggcttaataccagccagtcgagtctgattttcccctcaccccgaccctctcccacagggagagggggctgctacagcgacgtagtcaggtatagtgaacgctctgtttcccaccacaaaaagggggattcagtgcgaaggtcaggtaggtttctgtaattgatcgcgaactcgatcggtcccctctccctgtgggagagggttagggtgaggggcctacacggtgccgacactccacccacttaactgcatcagattgggcaggcggccagcttctcttcgtccgacagcgtatccagcttgaggatattcaacatgctgttggcgatctcgcgttcacccatcaccacctgatcggccccccggtcggagatatacgaaacctcgtcgtcgtaatgagcgcgggcgataatctccagagtagggcgcttggtgcgggccgaggccacgatctcaccggcttcataaccgttgggaatggtcagcagcagccagcgggcgcagtcaagccttgccagctccataatctcaggattagccgcattgcctaacaccgctttgatcccttgagcgcgcagcgcttcaacccgagggcgggagttttctatcaccaccatcgagacgccttcttcggtcagtttggcccctagcagactgccaacccgaccataacccacgacgacggcatgattgcagatatcaactgggatctgcttctcttcctctaccgcttcttccaggatctgatcctcgatggtttccgtcttggccagatagcgctccagcaaggtaaacaacagcgggttgagcatgattgacaggatcgccccggccagcaccagattgcggccatgctgatccatcatgcccagcgtgactcccaatccggccaggataaaggcgaattcaccaatctgcgccaggctggcggaaatggtcagcgcggtacgtttggagtggccgaacattttgaccagtgcgaaggctgccaccgatttaccaaacaggataatcgccagcgttgccaataccgccagtggttggttgatcaggatcatcgggtcgaacagcataccgaccgagacaaagaacagcaccgcaaaggcgtcacgcagcggcagcgtatcgtgcgctgcgcggtggctcagttccgattcgttcagcaccataccggcaaagaaggcacccagggcaaatgagacgtcaaacaggccgacagcgccgtaggcaatacccagcgccagtgccaataccgccagcgtaaacagctcgcgcgagccggtactggcggtttttgccaggatccatggcaccacacggngtttttccaggatccatggcaccacacggcggccgacgataatcatcagcgcgataaaggcgataaccttgccaatggtgatggccaactcggtgagcagttgcgtggtgctggcggtatcgctgttgagcatattggcaaatgccggcagcagcaccagggccaacaccatggccaaatctccgacaatcagccagccgatggcgatctgcccgcgttggctatcgatcagttgccgttcttccagggcgcgcaacagtaccacggtactggcggtggacagacacaggccgaacaccaggccggaaaccaaatcccagcccatcagtttggacaaccccatccccagcaccgtcgcgacggcgatttgggcaatggcccctgggatagcgatattttttactgcgaggagatctttaagcgagaaatggagaccaacaccgaacatcagcaggatcaccccaatctccgcgagttccggcgccaacgaggtatcagcgacaaaaccgggggtaaacgggccggcaagtacgcctgcggctagataccctaccaacggggagatgcgcaggcggtttgccagcattccgaagaggaaggcgagtactaaccctccaacaatagtggtgatcaagggtgttgaattatgcatccatactcctctggttgtgctcacgggtgttacgaaaggatacatttagtttattgcatttgagcgtttattgcttagctaatttagggttttgtgtaaaaaaccagactattcgtctattttggcagaaggaaggagaattatggcgtaattgaccggattaaatggggttttggagtagataacccggtttaacttctgcgctaaaccggggtaatgtcagggttattgttggttatgctccatattcggtagtaatgcagtgataatgccgataagcggcaggaatgcacagatttgataaaccagctcgatgctggtcaaatcagcgacataaccaagaactgccgcgcctaacccgcccataccgaaagcaaaaccgaagaatagaccggaaaccatccccactttgccggggatcagctcttgcgcatacaccagaatggccgagaaggccgaggccagaataaccccgatgatcaccgtcaaaatcccggtccagtagagagaagcatggggtaaagccagggtaaatggggcagcgcccaggatagaaccccaaattacatatttacgcccaaacttatcacccaaaggcccgccaataatggttcctgccgctacggcaaacaggaaggcaaacagatggaattgggcattctgtaccgaaacgccaaacttatgtatgagataaaaggtgtaatagctgctaatgctcgccaagtagaagtatttggagaatatcagtaccagcaggatgcttaaggagaacatgacggtacgttttggcagcggtttgaccagagaagcggcttttggcttgccttgggccgcccgatgttgctgcttataccatttactgacctgcaacaagactacaatagccagcagcgcagccagtgagaaccaggcgacattgcccttgccgtagggggcgataatcagggcggccaacagcgggccgagggagctgccgaagttgccacccacctggaacagcgactgggccaaaccgtgccgccccccggatgccatgcgcgcgacgcgggatgactcaggatggaatacggaggaacctgtgcccaccaaagcggccgccagcagcaccagagggaaagtgttggccaccgaaagcagcagtaagcccgacagagtgaatcccatgccgatggggagcgaataaggctgcgggtgcttatcggtgtaataaccaatcagcggttgtagcagtgatgcggtgagctgataagtcagggtgatcatcccgatctgcacaaagctaaggctaaaatcggcttgcaaaatcgggtaaatcgccacgatcagcgattgcatcatatcgttgagcaggtgagaaacgctgatagcaccgagaatagagaacgccgtgcctttggccgcgctgctggttaccggtggaatatccgtttcactacggtcagtcatattattattagcctggtaagtgagagagggaaagcgacatcttataacgttcatctttcgtccgacaacggggtagctgattctctctcgatcattatgtgctatcgggagcgccgataaaattcggaccggccgtgcctttccgacataatttgacgtatgtcgcaaaaatttgaaattagttgcagtcgattcgcgttacaatttcgtcctcatcaaaaaatacccattattaacaatggagatctgccatgcgcttttcgcttcacaccaccgcatgtgcgttggctgtttccctgacgttgttttcaggaacggtcagtgcctgggaaaaggataaaacctacgatatcaccatcctgcacaccaacgatcatcacggccatttctggcagaacgatcatggtgagtacggcctaggggcgcaaaagacgctggtggacagcatccgtcaggaagtggcggcgaaaggcggcagcgtgctgctgctgtccggtggagacatcaataccggcgtgccagagtcggatttgcaggatgcagaacccgatttccgtggcatgacgctgatcggctacgacgcaatggcgatcggcaaccacgaattcgacaacccgctcagcgtgttgcgccagcaggaaaaatgggcttctttcccactactgtccgccaacatttatcaaaaaagcacccagcaacgcctgttcaagccttatgccctgtttgaaaagcaaggggtgaagattgcggtgatcggcctgaccaccgatgacaccgcaaaaatcggcaacccggaatactttaccgatatcgaattccgtgtcccggcgcaagaagccaagcaggtggtggagcaactgcgcaaagatgaaaagccggacgtgattatcgctgccacccacatgggccactacgacgatggtaaccatggctccaacgcgccgggcgacgtggagatggcacgtagcctgcctgcgggctacctggatatgattgtcggtgggcattcgcaagatccggtctgtatggcgagtgaaaaccacaaacaggtggattatgtaccgggcacgccttgctcgccagatcgccaaaacgggacctggatcgtccaggcccacgaatggggtaaatacgttggccgtgccgacttccagttccgcaacggcgagctgaaactgatgcattaccagctgatcccgatcaacctgaagaaaaaggtagagaaagccgacggcaccagcgagcgggtgtattacacccagcagatccaggaagatccgtcgatgatgaagctgctgacgccgttccaggacaagggcaaggcccagttggaagtgaaggtgggcagcgtcaacggcaaactggaaggggatcgcagtaaagtccgcttcgtgcagaccaacctttcgcgcgtgctgctagccgcgcagatggagcgcgccaacgcagacttcgccgtgatgagcggtggtggcgtgcgtgactcgatcgaggctggtgatatcacctataaaaacgtgctcaaggtgcagccgtttggcaacacgctggtgtatgtcgatatgaaaggcagcgaggttgagccgtatctggcagcggtagccaatatgaaggtggattccggtgcctatgcgcagttcgccaacgtcagcttggtggcggacggcaaaggcgttagcgacgtcaagatcaagggtgaacctttacaggcagacaagacctatcgtatggcgacgctgaacttcaacgccctgggcggcgacggttatccgaagatcgataccctgccaagctacgtcaataccggctttatcgatgcggaagtgctcaagcagtatatcgagaagcactcaccgctggatgcggcggcgtacgagcctaaaggcgagatcgtttacaagtaaggtgacctaggccgttgcagaggaagctaacggcctactttttcagtcccgcttggcgatctcggcgaaggtgccggacagcaagcggcacagatcgctggccgccaattcaatatccaacccgcgtttgccgccggaaacgaaaatagtggcaaactgttgcgctgggctgtcgatcaccgtgggcaagcgtttcttttgcccgagtgggctgatcccgccaaccagataccccgtcacacgttgagcgactgccggatcggccatttcggctttcttggcccctagcgctttcgccaccttcttcaaatccaactgggtcgcgaccggcgtgaccgctacggccagatttttcgcatcgccattgagggacaccaacagcgttttgtagacctgttcggcgttcagccccagcttttttaccacctcgtcgccaaagttggtttcttcgctatcgtggtgatacgcgtggagggtgaaggccaccttttgtttttcaagcagaaccactgcgggtgtcataatctcttttccaaaactgtgggacgttgtcatcggtggcaacgaaacgataaaaatggagccgaatgagcaacctgtgccaaggaggatgaaaggcagttgccaataggttcgtcaggttgctaccctgtctattgtaatcgttaacacggttacaatgcgtataactaaaatatgaaaaattcctctttgactggccaatagcgatattggccacttttttatcgtgcctgtagcatggccggtaaattgtcttcgccatacagatgcaaagcaccgaccgccaccacatagttgcccggcggtaacgcttccagcttttgctgccagtggcgattgcggcggtgcatcaatacatcgtacaactcggcactgaaggtggagggcagcgtttccaacgtggcgttcggtttggcgtccagccaccagctcaccatggtttgcagcaaacgggcgttggtgtgccagtgctctaacgtatcgtgcagcagggccataccgccttctggcagttgttccaacatgctcagctgttcctcggcgccttccagttcgatcactggcatctgctgcactttagcggcttgcaatagctggtaatcaatcccgtattcggcgcgtaaacccagccgctgtgcctgccgcgcttgcatcatcagcgcaacctgccagccaggaagggcagagaagctctcaacatccgcccctaactcctggcatagcacctgcaacctttggaattcttcatgaccaaggcgttgttcaagttcgagttgcggctcagcgtggccaaatggcgaagaggagccggtgatatcggcctcaacgatcagcgcatcggcctggcgcaggcgtgctgccaaccgggcaggcaggggcgacatatcgacggtgcccatatgaatgctgccgaccaaatgcagttggcgatttcccggaagcctgatgtccagggccgggtaggtgtagctctgcggggaaataataccgagaaaggtagcaatgcggcgtaacagttgacccatacagcgtggctcctgatcctttccaccagcgtgcaggatggctgctggcttttccccatgctaaacgctaagtggctgacaataaagcccgagggcaggggaattatctcaaaaggccggagcgcgatgggttgcgccccggtggagggttactgcttgggtttaaaacgcagtaatcggttggcgttgctgaccacggtaatggaggagagagccatggctgcgccagcgactactgggctgagcagggtacctgtcagcggatacagcacaccggcggcaataggaatgccaagtgcgttgtagataaatgccccgagcaggttctgcttcatattacgcagcgttgccttcgacaaggccagcgcgtccgccacgccgttcaggctgtgacgcatcagggtgatcgccgcggtttcaatggcgatatcactgccgccgcccatggcgatcccgacatcggcctgagccagcgcgggggcgtcgttaatgccgtcaccgaccatcgctacccggtgaccctgtgcctgcaactgcttgattgcttcggccttaccatcgggcaacacgccagcgatcacgcggtcaatgccggcctctttggcaatcgcattggcggtcactgggttatcgcccgttaacatcaccagttgatagccttgctgatgcaggcgttgcagtgcgctcacgctgtcactgcgtaacggatcgcggatagcgatcagcgcggcaggtttgccattggcagccaacagcaccggcgtgataccgcgttcagcctgttgctgtatctgctgcgtgagctcatcggtcgcgatctgattctcttgcaacagcttggcgttacccagcaacagctgtacgccctcaacctcaccgctgacgccggagccgcgcaacgtccggaactgctctacagtaggcaatgtctgccctttagcctgttcgacgatggctcgcgccagcgggtggttagccccttgttccagcgcggcagcccaacgtaaggcctgctgctcatccacctggttaaaggtgatgatttccaccacgcgcggctggccttccgttagcgtaccggttttatcgaacaccagcgtatcgagattgctggcctgttgcagcgcatcggcgtcacgcaccagcacgccaaactccgcggcccggccaacgccagagataattgacatcggcgttgccagccccaaagcgcaagggcaggcgatgatcagcaccgtggtggcgatcaccagcgtgtagaccaactgcggttgtgggccaaagaagtaccagatagcggcgctgaacagagcgatggcgaccacggtgggcacaaataccgccgagatgcggtctgccagcttaccgatttccggtttgctgctttgcgcctggcgcaccagcttgataatacgtgccagcgtggtttgagtgccaatggcggccgcgcgaaacagtacgctgccgtcgtctaccaccgtaccggcatgcaccgtatcgccgacgcctttttgctgcggcaacgcttcgccggtcagcatggcttcatcgatccacacctcgccctgcacgatttcgccgtcaaccgggatgcgatcgccagtcgtcaggcgcaacgtcatgcccaattgcacctctgccagcgggatactttgctcacccagttctgtgactagcctggcggttggcggagtgagatccagtagccgttccagcgcctgggaagaacgctgccgcgcgcgctgctccatggcatgaccaaggttgatcaggccgatgatcattgcactggcttcgtaatacagatgccgtgcctccatcgggaagaagtctggccataggttgacgctgatggaatacagccaggcagcaccggtccccagagcgaccagcgtgtccatggtggcgctgccgttcatcaacgatcgccaggcattgcgatagaagtggccaccggcaaacaccatcaccgccagggtaatgatgccgacgatcagccacggccgctgggtttctggcgtcagcgacatactgccgccaaacacgccccaggccatcaacgggacgcccactgccaagcctaatgcggcctgccagcgaaagcgtttcatattagcctgtgcggtttgctgttggcgttcacggcgcttggtttcgtcctggatcatctccgcgccataaccggctttttctactgctgcgaccaacgcctgcggtgtggccttacctgtgatcagggcgctgcgctccgccaggtttacccgcgccaactcaacaccggggacgttctgtaatgccgtctgcactttattgacgcagctggcacaggtcataccgttgagcaacagctggatgctgtcgtcgctctcgcttgccggaagggaggagggggccgctgcctgggtttccggcaaggttggggcagattcagtcagcggctcagtttttgggtggctattggcccccgcctggctggcgtgatagcccgcatcctcgaccgcagcgatgagctgctctggagtggcatcgccatagactttggcgccctcaatggtcacatcggcggcgatcacgcccggcaccgcttccagcgctttacgggtgctgcccacgcaatgcatgcaggagaggccggaaagttgtaactcggtgtctgcctgatgggcgacttctgcctggaagccggcggcaacgatgctgtcaatcagctcggcagccggggctgcgccagtgactttggcgtagtgaacgttgacgttggcctgttcgacatctgcgcgactttccaaggcttttttcaccttttgcgcgcagttcatacaggagagtccctgcaacgccagcacggtagtttgtgacatgatggttttcctcgcaaataatggcggttgaccgcctaggttcttttcattaagaatgagcttaaaccttccagcaagggtaaggtcaagggggataaagtgaatatcagcgacgttgccaaaaaaaccggtttgaccagcaaagccatccgtttttatgaagagaaaggattggtgaccgccccgatccgtacggacaacggctaccgcagctacagcgccaggcatattgaagaactgacgttattgcgccaggctcgccaggtggggttcaaccttgacgaatgccgtgaactggtcgcgttgttcaacgatccggcgcggcacagtgccgatgtcaaagcccgcacgctgcagaaagtcgccgatatcgaaaagcacatcagcgaactgggggaaatgcgtcaacgcctgctggcgctggcggatcaatgccctggagatgaaggcgcagactgcccgatcattaataatctggcaggctgctgccgccaaggctagcggataatggcgcggatccccaaggtggtgccttcgaccgccaccacttcaacttcggtgccgatcggcagatcctcgttggcttgcgcgcgccagctgctgtcggcgatattgatgcggccatggccgttatgcatcgcttcggtcagtgtggcgcgggtgccgatcaactggcggttacgctggttgagcaccggagaactactggttgccgttggccgcttgcgcagccagtaccaccacaggtaggctactgcaatggtcatcacggcaaacagggaaccctgccactcccaactcaactccggtatcagccagataattaccccgacaatcaccgcagaaacgccgctccacagcagatagccgctggcaccgagcatttccgcggccaacagcagcccgcctaacgagatccagaaccattgtgggtttgctgcgatctgttccagcataattacttacctttgctgtctttcagcaattcggtaataccgccgatagagcccagcaggctgctggcatccagcggcatcatgatcactttgctgttattggcagaaccaatcttctgcaatgcgtcggtgtatttctgggctacgaagtagttaatcgcctggatattaccggtggcgatggcgtcagataccagctgggttgcccgtgcttctgcttcggcggcacgttcacgcgcttctgcctgcaagaacgccgactggcgttcgccttcggctttcaggatctgtgattgcttatccccttcggcgcgcaggatcgcggcttgacgtaccccttccgcttccaggatgtcggcacgtttggttcgttcggccttcatctgggcattcatcgccacaatcagttcggccggtggacgcacatcacggatttcgatacgggtaattttgacgccccaagggttggtggcctcatcgacgatatgcagtaggcggctgttgatgctatcgcgctgtgacagcatttcgtcgagctccatggaaccaagcacggtacggaagttggtcatggtcaggttaacgatcgcctgctcaaggttactgacctcataggcggcacgagccggatcgaccacttggataaagcacacggcatcgattgccacgttggcgttatcgcgtgagataatctcctgggaaggaatatccagcacctgctccatcatattgatcttgcggccaatacgatccataaaaggcactaccaggtttaaacccggcatcagcgttttggtataacggccgaagcgctctaccgtccattggaagccctgcgggacaattttgatgctcgagaagacgataatcagcgcgacaacgatcacgatcggaataatggtaaacatggcacaacctcctgtcagacatattgctagatattacgccagcgacagggggaatgcctaatgtatcaccaatgtaaggccattttttgcagaaaacgccagcatgtcaccgtgaatgggcagttttaaccgggtttgcctaacgttgccatgaagtgataatggagacttcttcaggatccgcgtcgaatttgctcagcgtcaccgtgtggccgtcggtcagcaacacgctgaccgccatgccgatcacgccggactgcagatcggtctgctcgatatgttgaagcgctttaagacaaacgaattgctgcatctcgggcaaatgtttgaatctgtcggtttgggattttttcaagagggctatcctttggcgctgccgacgatttggccatcacgcagcaacacaatcttgtgtttctgccggtaccagatggcggtgtaaacacctttctgataaacctgcgcatactggttttcttcggtcaacgcggctgccgtttgctcaatgtagccctgcttgatatccggcgagatcttgatgtctatcccggcaatgcgtgcctgcagtgtcttgctcttcgtcgattgcgcgtactgttttgccgcattttccaacgcctgcttctctgccgcagcgtaaatggcggtctgacggttttgttcggctagatagcaggtatccttggaaacgccctgtgcttcacattcagccatgcgcgacgccgtagaagtgcagccagccagcaagatggcaatcaccacggtagacagtgtcctaattatcatttttagttcttcgagttagtcaggatgacaccggagtgttcctgcgtttatttatgcatttttttagaagctattagctactaaataaagcgatgtttagcctggtttgttgatttaccgaactgatgctacagaatattcttaggcaagcatcacgttttaaccattatgttgaccaatgtcaatttttgtcagctactgagaacagatctcaaaaatcatttacacgtagctattagctccttaatttgagttaaattaactctgtgtcgaaatttgcgtagctgtgggggacggaatttatgtgctaaactgcggcatgtctgtagagagtaagaggaaatcgcagggtggataatcaagcagagtttaaaagctatctggaacgattaggcattgagcagcctgcactatgcatactcttgggggtgcagcgcagcaccctgaataaatgggtgaatggcacggtaaccgcaattccggccatcgccacgaccgcggtcaaaatgctgtggtttatcaaagagtccgatccggagctgttccagcgctggatgatgatccaggactttggcgtgccggcagagtacgcgaccaatgacaaggcgtatgaattcctgcacgtcctgaagcgtgagccgtcaccaccgattaagaaactccgggcccaggtggcggcccagaagcgataacatcgcgtgttaaactggtaaatcaatactttgcacaaagccggtgatgcgttcatcgcgccgttggaacagcgtgacaatttcttccacggctttaccacagtcgttacgccaggccagggagagcggtgacggttgccgctgattgaccacttcacgggtgatcaactggccgctatccagatagggttggcaaagatttttcggcaagaaccctacgcctagcccctgcaaatggcattcgagtttactgcgcagatctggcaccttgatctctttttggccgggcagcagccaggcaacgcgtttggtcaggttgcgcgaagtatcttccacgttgatcgccgggtagctacgcagccgatcttcatgcagtgccttgtcctggcaggccgcgagcggatgatctggcgtgaccacaaaagcccaactgatcccccccaatttcaatacgctgacgtcattagccagtgattcagacccggtggtgccaatggccagctgaaaatccccgtgcagcaacgaatcccatactcccatatacacctgacgcgagatatgaaactgcgtgaagggataacgctgttgcaggtaggccaacagccgggcgacgcttagcgggttgtacagcaggttgttgatcacgatattgacctgatgctccacgccgtcattgatctggcgtagctcatcgggcatggagtcgagccagttgtgccattggcggcaacgttccagcaggtattcacctgcgggtgtcaggttgacgctgcgggtggtgcggataaacagttgggtgccgatgctttcttccaacgttttgatgcggtaactgatggtggcagtggttttgtgcagtaattcggcggcgcgggaaaaactctggcattccgcgactttgataaacgatcgaattgtttcgtgatccagcatatcgattccttaaccggtgcggccatcattctcctagtgttgcaaaagaatttacttaccttagttgccttgggttagtcataaagccgcttcccgtgatcgcgctcacgttttattccccttcctctgctgaaagtaacaactctgttaacgaactgtatcgctgtggtgtgttttttaatgtgctgatttttaatgaaatattttaaatgtggcacagaaaatgtgcagcagatcgtattgtggaaaatttttccaataataacttttaaatttcaggcgacctgtctagagtgaacccattcagtaatgttcctttttgaaacgatcctggagaaactgatggacctgattgccgttgagttaacgcctgaagcctttgcaccctatgggaatgtattgcagatcgagggggcgccctttttccatattaatggtggtaaaacagaacgatatcatgatcttgccaatgtagaagtggccgacgatcatcgggtgctggtcagcatcaaccgatctgagccttgcgatcttccgttggagttctcagtgttggagaaacatcctttgtcttcacaggcttttatgcctatgaagggggaacgtttcgtggtgattgttgctgaagccggggaaggggacgaaattccgttacatactttgcgcgcctttatcaccaacggtaagcaaggggtgaattaccaccgcaacgtttggcaccacccgctgtttgcctacggtgcgatcaccgactttttcacggtcgatcgtggcggtgccgacaactgtatcgtcaaaacattgccagagacttaccgggttgtgcttggatagcgctgtccccaagcgcataggctgtttattatagcggagaaaccttgagctaaataaggaaagcctgaatgaacgaagtacgcagaaagggaagaccaacgacagaagcaggggcgacgaaaggcgcgcaggcgttggatcgtgggttggagatcctgcaatttctggccaatgccggaggaagctcatccgtttccgtgctgtccgagaagttggagttaccgctatcaacgactttcagattattgaaagtattagaaaaatcggaattcgtttttcaggatccccagcttggctggtggcatatcggcatccagtcgtttaccgtcggtgcggcttatatgaatgacagggacgtggtttcggttgcgggcccttatatgcggcggctgatgttgctatccggcgaaaccgccaacctggccatcaggaataactttgacgcggtgctgatccgtcaatgtgagtgccaggccatggtgcgtatgtgtgcgccacttggcagccgcttaccgctgcacgcatccggggcagggaaagcgctgctgtatccgctggcggaagaggagatgctggatttgtgcgtacgttcggggctgcactcgtttactccgaagaccctgaccagcgtaaatttattacgcaaggatttagcgcaatcgcaggcgcagggctataccgttgatgctgaagaacatgcccttggcctgaattgcctggcttcggcgatctttgaccgcaacaacaacgtcattgcggccatctccatttcaggacccagttcgcgcgttagcagcgatcgtttcaaggacctgggggaattggtgcgtgacgtggccaacgacatcagtaccgcgctaggtgagtcgcgcagcaagaaatagtacgtttaaagtcaagcctgtggtcgcgatcgcggctgcaggatgaggttccctccccgtttatcacctgaacgggtttttttgaatccattttaaatttggaaaatttttccaaaatttaggagaacgtttagatggcaattatgcgagcagtagatgcggcaatgtacgtgttggcaaaggaaggcgtgaacaccgcattcggcgtgcctggcgcggcgatcaaccctttctataacgcgatgcgtcaacacggcggcatcaaacactatctggcgcgtcatgttgaaggcgcttcccacatggcggaaggttacaccagggcaaaacccggcaatataggggtgtgtctcgggacttcggggccagcgggaacggacatgatcactgcgctttactccgcctctgccgattccattcccattttgtgcatcaccggccaggctccccgtgcgcgtttgcataaggaagattttcaggcggtagatattgaatcgatcgccaagccggtgaccaaaatggcagtgacggtcatggaaccggcgctggtgccccgcgtgttgcagcaggctttccacttgatgcgctctggccgccctggcccggtgctgatcgatttgccttatgacgtacagatggccgagattgagtttgatccggacacctactcctcgctgggggcttacaaaccggcggccactgaagcgcagatcgacaaagccctggacatgctgtgtgccgcaagcaaaccgttgttcatcgccggtggcgggatcttcaacgcggatgcggccgacctgttgcaagagctggcggagacctgcaacgtaccggtgatcccaacgctgatgggctggggctgtatcccggacgatcacccgctgatggcagggatggccggattacaaacctcacaccgttacggtaacgccaacctgctggattcggatctggtgtttggcatcggcaaccgctgggctaaccgccataccggttcggtagataaatataccgccgggcgtaaggtgatccacattgatatcgaaccgacccaacttggccgagtgatctgcccggatctgggtattgtttccgatgccaaaatcgccctgcaaatgttagtggcaagagctcgtgaacgtgcggatcaagggctgctgccggatcgttcacagtgggtggaaacctgcctccagcgcaaacaaactctgctgcgtaaaacccatttcgacaacgtacccatcaaacctcagcgcgtttacgaagagatgaaccgggcgttcgggcgtgatgcctgctacgtcaccaccatcgggctttcgcagatcgcggcggcgcagatgctgcacgtgttcaaaccgcgccattggattaatgccgggcaggcgggcccattaggttggactcttccttctgctttgggcgtctgtgccgccgatccgcagcgcaaagtgattgcgctctcgggtgactacgacttccagttcatgatcgaagagttggccgttggcgcgcagttcaagctgccgtatatccacgtggtggtcaacaacgcttacctggggctgatccgccagtctcagcgcggtttcgatatggattactgcgtccaactgtcctatgaaaacatcaacaacccggaagggggcgaatacggtgtcgatcacgtcaaggtggtcgaagggctgggatgtaaagcgatccgcgtcgttaagcctgaggatatcgctccggccttccagcaggcgcaagagttgatgcgtctgcatcaggttccggtggtggtggagattatcctcgagcgggtcaccaatatctcgatggggactgagctggataacgtcactgaattcgaacccgttgccgagtcgccagaagatgcgccgacctcggtcagctacttcaactatcagtaaggagcaggctcatgccgaagttttcagccaacttatcgatgttgtttaatgaagtcgattttatgcagcggtttcgctgtgccaaagagcagggattcacggcgattgaatatatgtttccctacgattattccgtgcaggcgttgaggggcgcactggaagagaatcaactcacgcaggtattacaaaacctgcctgccggggattgggctgcgggtgagcggggtatcgcttgcctgcctgggcgcgagtctgagtttcgtgatggcgtaggtctggcggtggaatatgcccgtgcgctgggctgtgcgcagatcaactgcctgatcggtaacccggataaatccgtcgcccaacataagaccgatgagattgtggtcgctaacctgagctatgcggcaagggagttggccaaggccaatatccgtctgttggttgaaccgatcaataaatacgatatgcccgccttctatctgcaaaccactcgtcaggcgttggagctgatggattgggttgcgagccctaacctgtttattcaatacgatatctaccacatgcagcgcatggagggcgaactggcccacaccatggaaacgctgttgcagaaaatcgcgcatatccaggttgccgataatccggggcgccatgagccaggaaccggggaaatcaattacgactatctgttccgcgcgctggacaagatgggctatcgcggttggatcggctgtgaatacaaacctgcgaccacgacggcagccggcctgtcatggattaagcaatatcaacattgagggacatatcatgaaagtaggctttattggtttagggatcatgggcacgccaatggctgaaaagctgatcgcaggcggccatcagctgtatgccaacaccttgaataaggttccgccggagctggtggagaaaggggccatagcctgtgctactcccaagcaggtggccgagcaggctgacgttatttttattatggtacccgatacgccgcaggtggaagaggtgttatttgcggccaatggctgtgccgaagcaccgctcaaaaacaagatcctggtggatatgagttctatctcgccgctggagacaaaggagtttgccaaacgcatcaaccaactgggcgctgattatctggatgcgccggtatccggtggggaagtgggggccaagcagggcagcttgaccattatggtcggcggtgacgaaggcgtatttgggcgggtaaaaccgttgctggccctgatggggaaaaacattacgctggtcggtggcaatggcgacggccagacctgcaaggtcgccaaccagattattgtagccctgacgatcgaagcggtatccgaagcgctgatatttgcttccaaagcgggtgccgatccggcacgggtccgtgaagcgctgatgggcggttttgcctcatcgcgcattcttgaagtgcacggtgagcggatgatcaaacggacgtttgagccgggcttccgtatctccctgcatcaaaaggatctcaatctggcgttacagggtgcgaagtcgttggcgctcagtttgcctaatactgccacttgccaagagctgttcaacctctgtgcggccaatggtgccaaagatcttgaccattccgcgttggtacaggcgttggaaattatggctaaccataaagtggctggctaaagagtaagacataacaagttgcaggtgtctttcgcctgcaacttggattctggttatcgtatcgttgtttaatggttatattcctgtctgtcttggccgtattggtatttgactaatataaagattagaacatcagtttgttgtaatgataataaacaaaaaaaactacgctattttcttatttaatataagaaggacctgtcatggaatctattagcaataagcagagagagatttaccaacggcgcggctatcatgaggacctattacccaaagaagcggataagaaaacctggaagggaattaactattttaccttgtggatggggtcggtacataacgtacccaactatgtagccgtcgggggcttctttattctggggctttccaccttaagcatcatggccgccattattctcagcgcctttattattgcctttgtgatggtgatgaacggcgctgccggttcgaaatacggtattccttttgccatgatcctacgtgcttcttatggcgtgcgtggcgcgttgtttcctgggatcctcagaggttgcgtggccgccatcatgtggtttggcttgcagtgttacgcaggctcgctggcttttctgatcctgattggcaaactgtggccgcagtttctgactttgggcggggatttcaacctgctggggatcggcctgcctgggctgattgccttcctgattttctgggcggttaacgtggccatcggcctgggaggcggcagcattctcaacaagtttaccgcgatcctcaacccctgcatctatgtggtgtttggcggcatggccatttgggctatttccatcgctggcctggacaacatcatcgcttatgttccggccaatgctataacgactcacaatggcggctttatgttcctggtggtgatcaatgcggtggtggcggtatgggccgctccggcggtcagcgcctcggactttacccagaacgccagcagcttccgccagcaggcctgggggcaaacgctgggattggtggttggctatctgctgtttgccgtcgccagcgtctgtatcctggccggggccagcattcattacggcgttgatacctggaacgtgctggatatcgtacaaaaatgggacagtattttcgcctcggtgtttgcggtgctggtgatcctgatgaccaccatctccaccaatgcgaccggtaacatcatacctgcgggttaccagattgccgctatcgccccgaaaaaactcacctataaaaatggcgtggtgattgccagcatcatcagcctgattatctgcccgtggaaactgatggagaatcaggaaagcatctacctgttccttgatgtgatcggtggaattttagggccggtgatcggcgtgatgatggcgcattacttcatcgtgatgcgcagtgagatcgaccttgataccttatatatcgaacccggtaattataaatactacgataacggctttaacagcgtagcgtttattgtaacgctgtttgctgtgttgctgtcattgggcggtaagttcattgagatactcgaacctttatcacgggtttcctggtttgttggcgttatcagcgcattctgtttatatgcgctactcaaaagtagaacagtggttaatcggcaagaatatacctgaagtgaatatgataaagaagtaaataaccctaagcgtaataatatgatactttaatttcacgaaggagcatgaccatgtcatatgatttaattatcaagaacggtaaggttgttttagaacatgatgccatcattactgatattgcggttaaagagggcaagatagccgccatcggcaatggtcttaccggcgccaaaacggagattgatgccagcggaatggtggtggcaccgggcatgatcgatgcccatgcgcatatgtccgagccgggccgtacccattgggaagggtatgaaaccggtacgcgtgctgcggccaagggcggtatcaccaccatggtcgaaatgccgctgaaccaactgccagccacggtggacagagcctcgatagaaatgaagttctcggcggcagaaggcaagctcaccatcgatgcggcccagtttggtggcctggtttcctacaacctggatcggctgcatgagctcgatgagattggcgtggtggcctataaatgctttgtagcgacctgcggcgatcgcagcgtcagcaatgacttccgcgacgtgaacgacttcgaatacttcaaaggtttgcagaccttagccaagctggatcagttggtggcggtgcacgccgaaaacgccctgatttgcgatgcgttgggggaagaggccaaggcggaagggcgcgtaacggcgcacgattatgtcgcctctcgcccggtattcaccgaggttgaggcgatccgccgggtgctgtatctggccaaggtcgcgggttgccgcttgcacatatgccacgtcagtagcccagaaggggtggcggaagtgactcgcgctcgtctggaagggcaacaggtcacctgtgagtcctgcccgcattacttcgtgctggataccgaccagtttgaggaaataggcaccttggccaagtgttcaccgccgatccgcgatgcgcagaaccaaaaagggctgtgggataagctgtttaacggtgagattgactgcctggtgtccgaccactcgccgtgcccaccggatatgaaagcgggcaatatcatgcaggcctggggcgggatcgccgggatacaaaactgcgtcgatatcatgttcgatgaagcggtgcagaaaaggggcatgtcgctgccggtgtttgccaaattgatggcgaccaacgccgccgatatttttggtttgaagcataaggggcgcattgctgtagggaaagatgccgacctggtgttcattcagcccaacagcagctacgtactggcaaccggcgatctcgagtatcgccataaggtcagcccttatgtggggcggaagatcaacgcaagggtggccaaaaccatcctgcgtggcgaagtgatttacgatctcaaggcgggttttggcgttcgtccgatcggtaaatttgtgcttaaacatcagcaataacgctagttaatcagcgcccgtcaccgggcgggcgcgtgaatgatgggatagtggatatgaaggaagcccccatgaacgggttatgtgccagtcgtagcagttggttatcgggtttgcagtggttctttttcattttctgcaatacggtggtgatcccgccgaccctgcaatcggcattcaacctctctgctggtgtgaccttttgtattacccaatatacctttatctcaacggcgctggcctgcctggcacaggtatttttgggccatcgacgagccattatggaagggccaacaggcctgtggtgggtgaccatcttaaccctgaccctggcggaagcagccaacggtacgccgctgccagaaattggtggcagccttgcggtagggatcctgatctctggcatcttgaccattcttattggggctagcggcttggggttccgcctggcacggctgttccgtccggcggtgatggccacgtttatgtttttgctgggggcgcagttaatcaccatcttcatgaaagggatgctggggttaccttttggcgtttataccggcgtcgtgaccattaactacccggccttttactgggcattgacggtgttgctgctgattatcgccattattgcctttttaccgcgggcgatcggcaaatatgcgttgttaatcggcactctggttggctggggcgtttacagctggtggtttgcacccaccggtgagccgctcacgggcagcgattgggtactgttcccactcgggtggccgcaggaattgcattgggggattgtgatcagcgccgtcctgaccggtttggtcaacgtgtcgaataactttgccgccattcgtggcaccgatattttttatgcggacggcccggcgggcagaagcctgttccggcgtagctttatggtctcaggtgggctgacctgcctggctgctccactgggcgtggtgcctttctcgccttttgtctcttccattggcctgctgacccagacacaagacagcagtcagcgctcgtttattatcggtagcgtggtattcctgctggtggggatgttgacgccgcttgcgcaattcttctgcagtattccgctcacggtcagcagtgctgtcatgctggcctcttatctgcccttgctgttctcctcggtgctgtttatcaacaagatcgaactgaatagccgcaatatttatcggctggcgctaccgctgtttttgggcgtgttcctgatgagtatgccttcctccttttggcagggggtgccgatcaccatcaggccgctattcagcaatggcctgttgattggcgtactgctggcggtgttggttgagaatagtattccgtgggataaggtgaaaccacgctagcatttataatatagcaatcaatattgtttaaattctcaccgccctgtctttgatgatgagggcgatttaatccaatgacactgaaataaaatctgaaatagcaggatgccaaccaaggagatccgatatggcgaccaataatgctgcgattgatcaagctattctggccagtcccgacaaggctaaactctaccgtaaaatagcctggcgaattatgccgatattactgattagctatatcgtcggttatcttgatcgtgttgggatatcattttcaaaattccagatgatgccggatattctgcaaggtaatgtgtcgatggcagaggcggtttatggcctcggtgctggtgtattttttattggttatattatcgccggtgtaccaagtaatatcttactgagtaagtatggtgcgcggaaggtcatcgccctgttgatgttggtatggggcacgatttcaatgctgagtatcttcattaccaatcccacacagttttatctggcacgattcctgctggggttagccgaagccggtttttatccgggggtgatcctctatctgacactgtggttcccttcaagccagcgggcaaaaatgacggcgctgtttgtttgtgggataccggtgagtaacatcatcggtgggccactttgcggttggattattgaaaacatgaatggcatgttcgagctgtccggctggcaatggttattctttatcagtggtccgcgtgcattattgattgcggtcgtcattttcttcttcctggataatacctatcagagtgctaaatggctcagtccacaagaaaaagagatgatcacccaagatatggtgcagggaacatcgaaaaagataggtgctgatggtgcagcgcaggagtggacaatgaagaccatgctgaagtcttctgctttcactaaaatgtggttgatctgtttctgtacggtgatggggcaagggggattggccttctgggtgccaaccatgatccgtgatacgggggtaagctcggtaatggatatcggtttgctgaccatgctgccgtatatgctggccgttgtcgctatgctaatggctgcgcgcagctctgacaaacatcgagaaaggcgttggcatatcattgttcctttctgtattgccgcggtttcgctgatttttatcggcctgttcccagacaataaagtcatcgtgatggtggcattatgtattgctgtcgcctccagcctggtcccttcgccgctattctggagtttgccaaatgctatctttaccggtacctgcgctgctgctggaatagcgctaattaactcgattgccaatataggaggttttatttctccttatattattggttactttaaaaataccacggagagtaatctggtcgcgatgtgtgtgctatccagtatgatgatattgggggccatattgacctatagcgttccggcaaaactggttaataaataatagtcaatagaagttcggttattgataattgctccgattgataaaaaaccatgctttctctgcctatgtggtgatctattacattggctgagggtgtggttttttttggttaatgatgaagagaggaacgttatggtggcgatattaaaagtggagtagggtggaatgaataacaggtgacacagtgttggcccctcaccctaaccctcttccacagggagaggggaccgaatgtgccacgtattaactccagcatattaatgtctttaccgggatccttaattaaggattggcaacgtgttaccgattaacatcagcgtatcgaatcgatagattgaatccagcgtattaaagtctttgtcttaccgatgggcttctacacttgaatgttgcgctgaactggctccctctccctgtgggagagggttggggtgaggggaaatattgattgctgaatgagtaataagactctgctttaatcaattaggccacactacttagagcgtggcctttgggcgggattagaagtcaacgtcgcggttgcagtctttcgagtagatatagctgaactcttcctggcccaccgcatagccggcttgcggaacataggcagccataaagatgtaatcccctttcttgaccgggatccactcattatccaggttgtacatcccagcaccgctgagaatataagcgccatgttcctgcacgtgggtctcgatatagccatggctggcgcctggcttgaaggagaggatatggatgttcatgtcgaaccccagatccttcggcagcagatcttgcaggatcacatcgctcatgccttcatagtgaattttttccagcttgttgacgttgttgctcaccacgtgggcttcatagcccttgatgcggttgtagacacgcttgtagaggaacagctggcttggttttccgccgttggtgttctccaggcgcagcatcacacctgcagggcaatacagatagccgcccgtggtgagtggataatcggtgctgtcggctgacgcggtgatgttgccttcgataacgtagaccaaggtttcaatattctcaccgccaaagccttgctggttacggccgccatcatgcagtgtcaccagataatcgacaaaagtggcgcccagtttcggggtggcaagaatggtaacgtcgcagttctcaaagcctggaatgatgttacgtaccaggccatccggtgggatcacggcatagttgtcgcgtttgataatggagcgcgaagctaggatatcttttggatagccaatctgattattgatataacccacgttaattctcctgattagtcagggccgtagccctacaacaaaaattatgcctgtgccgccgtttggcgattgtttttctgcttcatcaacacgttgacggtaaagaagatcacggtgccgatcagcaggatggcggccgagatatagaagcccatcaccttggagccggtgctgtcggagatcaccccggtgaggaatggagcaatcaccgaagaggacatgccgaaaaagttaaacacgccaaagctggtgccgtagcctttcttcggggcgttatccgcgacgaaggagatcatgattggatccactgccagcttaccgagcaggccgtaaaggatcaggctgaccagcagggtggtggagtcaggtgagatcacggtgcagaccagcgtcactgcggcgcagatttgcaagaagatgatcaactgcactttcttggcgcggaaacggtcagacatgcggctgaagaacagcgccccaggaacggaggcaaaggcaaccagcgcggcggagaagccgatggccacgccttcgaacccacgttcctgttgcaggaaggaaggcagccaggtcacgatcatgtagtagccatagcaggtggcgaaatacatcacgtaggcggaaatcatccgcaggctgaacaacccactggcttcctcggtctcttccactggagtggccgcggaggcagccgggctggcggccagagaggcggtataggagccccctttgatcaccaggaagaacaccaccgtcattaccaccagcaagccggtgatgataaacagcatgatttgccagtccatccccatgcttttcaccagcaggctggaggcgatcaggccaatggccatccccagcgcagagccgctgttgataatggcggtggccaaaccacggcgttccaacggaatgttttctgatgacagcgagtaggctgaaccgtagtaagagccacagcccatcccggccagcaggctaccggcgtagatcatggtcaggctggtggcgttgccgatcagtaaggtggcgatgatgaacaggcaaaaacctgggatcagcaccaccttcttgccgaacttatccaccaggatcccggccgggatttgcatcccggtataggcaaagaagtagaagctggcgatcaggcccatctcggcgttggaatgcgagccgatggttgcctggatctcagggaagatcggtgtcagcaccgtgcggtaaatccagatcaccgcccagcccaggcacaggaccaccacgatttttttccaatacagcggatcaaatccggtgttggaggaggttttactgttgctcataggcgggctccctgctcggtgtaggccagttggtataaggtatgcgccagaattttcaccccttcggccaggtcgggcagttcggttttttccgccgggttatggctgataccggcaatgcttggcacaaacatcatcaccgtcggcacgtgcggggcaaaaatctgtgagtcatggcctgcaccgctgtggatcatgcggtagttcagcttatggctttcgcacaggtggctgacgcaggccagtaactgtttgtccatggggatcggcgtttcatccatccacaggtcgatctcgacctcaatgcccatttcggcacagatgcgctgaatatcggcttcgatctcttgggtaaaacgcagcagcgtcgctttgtcggtgtggcggcaatccagggtgaaatgagtgaaaccaggcacgacgttgacggtgttaggcttgggctctaccttgccaaaggtcagcaccaacgggtcgccttccgctttggccttggcgatggattcgcagcagatccggctgaaggcataaacggtgtccttacggtaacccattggcgtggtgcccgcgtggttggcctcgcccttgagtttgatatcgtagcggcgctggccgacgatgctggtgaccacaccaatggtttttccttcggtctccaacactttgccctgctcgatatgcagttcaacgaaggcggcgatatctttgcgcagcggctggttttgcgggcggaagtcaaagcctgcgctatgcatggcgtcaacgaaattcacgcctttggcatcacagatgcttttgacttcttccgggcgagcggaaccgataatgtttttactgccccagaaaacgtaagggaaacggctgccttcctcctcggccagcgagatgacttccagcgtgcgtaacggcgcgccgtaggtttctttcagatgcttgatcgccagataggcggcttcgataccaaactgaccatcaaggttgccgccgttgacgaccgtatcgatatgcgagccagaaaggatcacctgatcgggatatttgctgccctgcaggcggccggataaattgccgacggcatcaaaagaggtcgccagaccggcggtttcaaaagcctgcttcagcgcctgttgggcttccacccactcaggggtatacagcaagcgcgtcatgccgccgctgggatctgccccgatcttggataaccagccagaagtttcactaatttcttgttggaaattcttcatatttatctgcctgcttgtaacgtccctgagacatgcgccaactcagctttgtcgggagggttgataaggaaaatggcggcgaaaatagcttttctccgcctgatttaattaatctgacgattaactggcaaacggatctttatggtcgtaggaacgctggtaaatatcgtcagaaatcaggtattgataaatgtcgtcaacaatatcgatgccattcttttcattttctatttcacgcatatggctaccccggcccgggtagagcacttgtttcacgccaggtgccggtttgatttcgttcagttctctcattacctggctgatatgtttgcggaaggtcacctcgttggtgaaatagcttgggttgagcacgatatgcaactggcccaattcccggcctgcacttaagtcgtgatacatcgagctgacgtgtttaccgaacggcaggccaagcaacacgccggatagaatatcgaccatcatcatcaggccgtaaccttttggcccggcgataggcaacagcccgctgacggcgaaaggatcggtggtgttattgccttcgctgtctaccgcccaggtatccgggatgggcacgttgcgtgagcgggcgtccagcaccttgccccaggccggacccgtggtagccatatcgaaggtcatgatgtcgtcgccttcggccggcgccgagaaagcgatagggttggtgccgtaatagacctctgcaccgccataagggacgaccatcggatctgactgacacactgatataccaatcatgcccgcatgggcggcctgctgcacaaagtaagacagcgcgccactgtggccgatgcggcgaacgcctaccaccgcgacgccgttctctttcgccatttcgatggcgtggtccatacccagcttggctgcgacatgcccggcaccgttgtcgccatcaaaaactgcgctgcaagggccggttttttcaaaggtgaaatgcgggtcgttattggtgccgcctttgctgatgcgttcagaataatattccaccctcaccgcgccatgggaatggatcccgcgcgcatctgcatggaccaaaacgtccgcgacaatcccggcgtgttcctggcttaggcctgcagaatgaattttattttgaatcagttgatgcagttgctgcttagagactttcattgacagtccttccattgatataccccatggatttcaagctgcagcttgaaagacgacgggtatacggtttattaaaactatctctgtctcctactgtataaacatagcaagggaataatgtgatccagacggctattattttattggcttaaattttcgttgaatggcattaccattgttagattatttttaacaaagcgccgtctttctgacgattgaattcaattaatccccgccagacttgatgattttttctaacaatgggcaaagtgtgatgagactcacctttgtcaatgggttttatttgtagcttggccaataagaatatggggtctgaaataaataggttactaaaaatatctgagaacgcccattgagaagttcacatgctgttttaaggatatcactatgatccatgcttttataaaaaaagggagctttcaggattccgtcagcctgatgctaatttcccgtaagcttagcgaatcacccaacgtcgaagaaatatcggtcatgatggggacgccggccaataaatccttacttgaagcgaccggtttctggcatccgcaattcagtgaagcgacccccaatgatatttgcgtggcgatcaaggcggaatctgccgatgacagcatcaccacacagatcggtgaagcgttagacctggcgttgaaagccattgcccaagggcagcagggcggtaaacgcctgctcaaggcacgcagttggcgcatggcgcggcagaagttgccggatgccaatatggtgctgatctccattgcaggggaatatgccgcgcagctggccgatcaggcactggacgatggctgcaacgtgatgatgttttccgacaacgtcagcgttgagcaggaagtggcgctaaaaaccaaggcgcgtgacaagggcctgatcgtgatggggccagactgtggcacggccaatattgccggggcaccgctggcctttgccaacgtggcccccaaaggcatgatcggcatcattggcgcctcgggaacgggtatccaggagttgacctcacaaattaccctggctgggcaaggcatctctcacgccattggcttgggcgggcgtgatttaactgccgaaatcggtggtatcagcgctatcagcgcactgcgtatgttggcggccgatccgcaaagccaggtgttggcgtttgtctccaagcctccggccgaagcggtacgtcaacgggttatcggtgagatgaaaacccttggcaaaccggtggtcgcgctgttcctgggagctaaagcgcctgcgaaacaagagggtaacatcaccttcgccacgacgttggatgaagccgcccgcctggctgcgatgttggcaaacgtgcagcaaatggccgcacagcaacctgcggtatgcggtggcaaaatatccggcctgtacgccggtggcacgctggcggcggaatgcgccatgttgctggccgatcggctgggcgtggaggccgacagcaagcatcagcacggctcaatgctcaacgccgacggacaccgcattatcgatatgggggacgatttctacacccagggcaaaccacacccgatgatcgacccgtccacccgtaatcaggaaatcgctcgccttgctcagcagccgcagattggcgtgttgctgctggatgtggtgattggctatggcgcgcaggaagatcccgcagattccttggctaccgaagtcaaacgcgtgcgtgaaaagcgtggtgcagcccatccgttggcagttatcgccacggtgacaggcaccgaacaagacccccagcagcgctccaaacagattgccacgctcaccgaggccggcattgccgtgatgaattcgctgcctgaagcggtagcgctggcctgccagttaatcgcccctccagagcagggtaataacgaaccagcacccgccatgctggccggtgtttccgtgatcaatgcaggcttgcgtagctttgccgacgatctgcaaaccaacgaaatttcagtggtgcattaccaatgggccccggtggctggtggtaatcaacgattggctaacatactgaaaaatttaaagtaagggattgatatgaccgcaactattgaacaagcaaacgctgccgttatcgccaggatccgtgaagcccgccctcattggcaggatgttgatttagcgaaaaacctgatcccgcagttggcgcaggggagaaaactgctgcatgccgggccgccggtcacctgggcggaaatgagtggcccggtacgcggtgcctgcattggggcatgcctgtttgaacagtgggctgaaagtgagcagcaggcgctggcactgctggaaaacggtgagattgaattcatcccttgccataacgtcagtgccgttggcccgatggggggcatcacctcggcgcatatgccgctggtggtggtgaaaaacaccgttcatggtaaccatgcctactgcaacctgaacgaagggatcggtaaggtgatgcgctttggtgcctatgggccagacgtgcaggcgcgcctgcgttggatgcgtgactcactggcaccggtactgaaagaggttctggccacctttgatgaggggattgacctcaccgccgttatggcccaggccatcaccatgggggacgagttccaccagcgtaatatcgcggcgtcggcgctgctgatgcgtttgttagcccctaaaatcagcctgcttgagcgggacaacgttgagctggccaaggtcatgcaattcctcagcatcaccgatcagttcttcctcaacctggcgatggcctattgcaaggcggccatggacgctggggccgagattaagcaaggcaccatcgtgacggtgatgacccgtaacggcaaaaactttggcgtcaagatcagcggcatgggtgaccaatggtttaccgcgccggtcaatacgccggaaggcctgttcttctccggctatagccaggctgacgccaacccggatattggcgatagcgctattaccgagaccttcggcattggcggtgcggccatggtcgccgcgcctggtgtgacacgttttgtcggtgccgccggtggcatgagcgccgcgaccgatatctccgaagagatggccgagatttacctggaacgcaacatgatgctgcaaatcccaacctgggacttccagggcgcttgcctggggctggacgcccgccgggtggtggaaaccggcattactccgttgatcaacaccggaattgcccaccgtgaagccggggttgggcagattggtgccggtaccgtgcgtgctccattgggctgctttgaaaaagccatcgaagcactggcagaaaagctgggtatcagcgcgtaacaacctgttcgcccggaggagactccgggctagggagcaagttatggacatcaccgcgttagccattagccgctatgccacgcaagattacggcccgttacgctgcgtggggcgtttcaacaatgccatcaactttctctcgcctaacgatcggctactgacgttgcaccgtgaagggcgtgggcttagcccaatgggctgggaaattggcgacgatgacttcgacgaaatctttgacagcctgcctgcggcccagcattgccagctttcaccggcggggatcgaactggaggatattgccatctaccgccaggggaggtgcttggatctctgcctgaaggtgagaggagaaattgcgttgccgccattggctaccgcgctggccgatgttgacgcccagactggcctgtttggccgcctggacaacctcattgaccagccgcattgtctggaaattcgcgaactacagcagcacgttaccgcctggttgttggggcagaaagtggactggagcgccgtgcttggcaaaggccctggcttgacgccaagcaatgatgacacggtgctgggcatgttgctggcggctcatctcgatagccgcgtggatgtcgcaaggttgtcgtccttttttgccgccagccaacccttaagccagttgaccaccttggtcagcgtccactatttgcagtttgccgagcaggggatcttctccaccccggtacaactcctggcacgcgccttactcagaccacaagaattacccgcagccatcaacgacatgttggcaaccgggcatttttccggtgcggacacgctattgggcgtctggttgggcgcgatggcaatcaatcgtctttattaatttatcagcggaaaaccatgccgaatgccgttcggtatgggctgctattacttgaaaaatgggtacctgaatggaaacgttagttattgccttggggggcaacgccctgttaaagcgtggcgcggtgttatctgcagagaatcagtatcagagcattgcgttaattgccgatgccattggcaagctggccaagaaataccgcatcgccatcgtgcacggtaacggcccacaggtggggttgttggcactgcaaaacctggcctatcgcgatgttcctccgtatccgctggatattctggtggcggaaagccagggcatgatcggctatatgctggcccagcagctaggggcattccatcctgctcagccggtgtccacgttgctgactcgcgtcttggtagacagcgaagatccggcgtatcgggaacctagcaaatttatcgggccggtttatgagccgaaacagcaagccgagctggaaaaaaagtatggctggagcatgaagctggatgggaaatacctgcgccgggtggtgccttcccctgaaccgaaaaagatcatcgatattgaagcgatcaatctgctgctggcgaaaaaccacatcgtgatttgcaacggcggtggcggtgttccgatggtggccagcgcacagggaatgatcggtagcgaagcggtgatcgacaaggatctggcctctgcgttactggccgaagccctggacgccgatcacctggtgatcctcactgatgctgatgcggtgtatcagcactggggcaccccgcagcaaaaagccattcgttctgccaccaccaaagaactggccccgatggccgtagccgatggttcgatggggccaaaaatcatggcggtcagccgctttgtgcagcgcagcggcaaggtggcacatatcggtgccctgcaagatatcgagtcggtactggcaggcaccgcggggacattaattacgccgtaatactggatgggccgagcggcccatcaaccaagggaaaatgaatatgcaaactataaaaacagagcgaatgccctattggattaaaaccgtagtgatcttcttcctcggctgggtcgttatctatgccgggcgttcggtacttagccccatcatgccgcagatccaaaccgagttcgggctgtcaaaaagccatctgggcttaatcagcagcctgttcttcctgacctacaccattttacaggtgcctgcggggctattgggtgaccgcttgggcagaaaacgcattctggtcagcggctttatgctgtttgcgctgtttatcgctgccgtcagcatctcatccaactttctgattttcatcgtgctgtggatgctgaccggtgcttcgcaaggcgtctattatggcccgcagtatgcgctttcatccgaggccatccccaagaaatggatcaccttgggcagtgcggtgatcggcagcgggatgtcgttcggtatcgcgctggggtattacctttccagctttatgatcgaacactttcatacttcgtggaagatgccgttcctggcgatggcggtcccggtattgattgtggcgctgctgatgctgtttttcattcgggaaaaagcgccgcaaagtgccagcgacgctccggtagcggcggcagcaaagagcgaattcagtttcctggatctgtttaaaaaccgtaacctgctgatggcctacatcaccatcttttgctcgatctatggcttcttcgtgatcattacctggctgccgtattatctgcaaaaagaacgcggcatggatattgtgcacgccgccagcatcgcctctatcgtaccgtggatctcggtgctcgggacgctgatttgcagctatatctccgacaagctgggccgcagaaaaccggtggtgctgtttatgctgcctttctcactgttggcgatcttcggcatcgtttattccaccagtgaagcggcgttgattggcgtattggtgctgtatgggtttatcggcaaaatcagcctcaacccggtacttatcgccctggtagcagacaacgcaccgcgtgccgcgctcagtaccgctttcgggctgtataacttctttggtatggcggcgtcgatctttgcgccttacgtgactggcttcattgccgacagcacgggaacgttgaatgcgggcttctattttgccgcgatgatcacggtggtgggttttatcgccatgttgttcgtcaaagaggggaaaccggcgcaggaggcttgatgtttgatgcagggcgcaaccgtgcggctgcgcccatgtacgattaatacagcagtgaatacagctggcggcgatacttggcggccagcgcatcgccagtccccagtgcggccagaatatccatcaaggtcttgcgggcgctaccgttagccgccgccaaatcctttttcagatgatccatcagcaattccagtgcctcttcgttacggccaacctgatgcagttgcaaggctagctgcacggcaagttcgacgttttccggctgttgctgagcctgctgctgcaactgctgaatttccggcgtatcggcggcctgcttcatcagctcaatctgcgcgaccaggccgaggtaacgggtatcgcgatcctgcaatgggatggtcgccagcaccgcttcggcatcatccgtcttgttcagggcgatttgggtttccgccagcgtcaggccgatatcgctgcgctgattgctgaggctccaggcgtctttcagcaaaggaagagcttctgcagcacggtcttcctgcaacagttcggtggcttctgccagcttgaggtcttcggcttttggcaggaaacgctgcaggaattcgcggatcatttcttccggctgcggcccttggaaaccatcaaccggctgaccatccttgaacagataaacggttggcagggaacgcaggccaaactgggcggcgatcgcctgctcggcatcgcaatccaccttcgccagaacgaactgacctgcgtattccgccgccagtttatccagtatcggggtgagttgcagacagtgctggctgcgatccgaccagaagtagaacagcaccggctgggacatggactgttccagcgtttggtgcaggttagtttcgttaatatcaacaacggcttgagctagcatggtttctctctaatctgatcttgcggagccaatctattctagatgggggcaatgcggcgcgcttcaacccttagcccccgtttgcttaaccattactgcgcaataaccagtccagcgcgcggcctggcaacaggcggcgcaggatgctcatggtatgcgccagcagggtgaccgggtagcgcagcttggctttggggctttccagcgcatggcgcagcttcggtaacaccgcttcggcgggcagcgtcaaacgcttggcaatactcgggttgtgcaccggtttatcgctctgcgcctgattgacgttctgggtgaaatgggtcgtcagcgggcctggctcgatcaggctgacctgaatgccgctgccgtgcagttccatacgcaacgcgtccgaccaggcttccagcgcaaatttgctggcggcataggccccacgcccggcgctggagattaaccccatcactgaactggtctgaataatgcgcccttcaccgtgcggcagcatggctggcagcagcaactgggtgagctggtgggtgccaaacaggttggcggagaattgccgttccagctgttggcgtgaaaccgagctgagtgggccgtaaacgccgaaaccggcattgttgaacagaccgtatagccgcccgttggtcagctcgatcacctgtgcggcggcgcgttctacgctggcgctatcgtccagatccagctcaatgccttccagcccaagctggcgcatgttttccacgtcttccggcttacggcaggcggccagcacgcgatagccacggttacgcagatcttgcgctgcaatcaatcctatcccgctggaacagccggttatcaataccgctttttgcataactttacctagtagctaaccctattcagttagactcatgtttaactagtggttccaactgttgcgccatccaggtggcgataaacggctgggcatcctgattggggtgcaaaccgtcatcctgcatccattccggtttgatcaccacctgttccatgtaaaacggcagcagtggaatgttgaactgcttggccaacgccggatagatctcaccgaaggcctcggtatagcggcggccctagtttgggggaatatgaatttgcatcagcagnatagtttggcggaatatgaatttgcatcagcagcggtttggcccccgcctgcaaaaccagcgtgataatctggctgagatcgcgctcgatatccgtagccgggaagccgcgcagaccatcgttggcacccagttcgatcagcacccagcgggggtgatgttgtttcaacagctcgggcaagcgtgccagcccctgagcggcggtgtcaccgctgatactggcattgaccacggtcgggtggccaggttgtttctgccattcatcggccaggcgagtggcccaggcttgcgctaccggcaaccgatagccagcacttaaactgtcgcctaaaatcaataaggtatcggccgcgacagcacgtaaactgaataatcccaacagcaaaaggaagggaagatgccagcggaaaacgttcttgaagttcatcatcttagtaaacacgttggtcagggtgagcatcagcttaccatccttaccggagtcgagctggttgtcaaacccgcacagacaattgcgctgatcggcgagtctggttcggggaaatcgaccttgttgggcatccttgccgggctggacgacggtagcgaaggagaagttagcctgctgggggagtcgctgaccgcactggatgaagaagggcgcgctgcgctgcgggcaaaaaacgtcggttttgtgttccagtctttcatgctggtccccaccttgaacgcgttggaaaacgtacaactccccgcactgctgcgtggtgaaaacgatcgtcaaagccgggaccaagcggtgcaactgctggaacaactggggttaggcaagcgtcttagccacttgccagcacagctttccggtggggagcaacagcgtgtggcgctggcacgggcgttcagtggccgtccacgggtgctgttcgccgatgaacccaccggcaacctcgatcgccagaccggtgagcgcattgccgatctgctgttctccttcaaccgcgatttcgccaccacactgatcctggtcacccatgacgagacgctggcggcacgctgtcagcggcggctgcgcttgcgtgaaggcaagctgtgggaggaagcatgatttggcgttggttctggcgtgaatggcgttcgccttcgctgctgatcgtctggctggcgctgacgctgtcggtcgcctgcgtgttggcactgggcagcatcagcgatcgcatggacaaaggcctgagccagcaaagccgcgactttatcgccggggatcgggtattgcgtaccgcgcgcccggtgccggaaggctggctgctcgatgcccaacaacaggggctgaaagtcagccgccagctctcttttaccaccatgacctacgccggggatcgtccactactggccaacgtcaaggctaccgatgcggcctacccgctgtatgggcagttggaaaccctgccagccaatctcaaacctgtgccgggcagcgtgttggtggctccgcgcctgttggcattattggatatcaaggtcggcgataatctggaggtgggggataccacgttacgcatcgccggtgaaatcgtgcaggagccggattctggcttcaatccgttccagactgcacctggcattatcatcaacctggcagatgtggataaaaccggagcggtacagccgggcagtcgcctgacctaccgttatatgtttgccggtgcgccaaccgatattcaacgttatgaagaacgcctcaaaccgcagctcaaacccgatcagcgctggtatgggttagaggagtccggcagcgcactgggcaaatcgctacagcgttcccaacagttcctgctgctttcggcgctgctgaccttgctgctgtcgatcgccgccgtagcggtggcgatgagccactattgccgcagccgttatgatctgatcgcggtgctgaaaaccctgggcgctggcagaaaggcgctcagtaagctgattattggccagtggctggcggtgttattgctggcgggaatctgcggtagcgtgattggtctcggttttgaagcggtgctgatccgcttgctggcaccagtgttgccgggggaactccccgccgccgggggctggccgtggctttgggcgatgggggctctggtcatgatttcgctgctggttgggctgcgcccgtaccggcaactgctggcgactcagccgctgcgcgtactgcgccgggatgtggtagccaacgtctggccgctgcgttacttcctgccagccactgcggtgattgtggtcgggctactgacggtattgatgggggcaagtacgctgctgtgggccattttggccggtatggtggtgctggccttgctgctagggggaattggctggggcagcctgttgctgctgcggcgcatcacgctgaaaaatctggcgctgcggttggcggtgaatcgcctgttgcatcagccttgggtgacgatcagccagctagcggcattctcgctgtcgtttatgttgttggctctgttgctggtcttgcgtggcgatctgctcgatcgttggcaacagcagttacccccagacagcccgaactatttcctgctgaatatgaccacggcacaggttccgcaggtgaaagccttcttgcaacagcatcaactgcatgaggaaaccttctatcccatcgtacgtgtgcgcctgtcggaaattaaccagcaggtggcgacggagcgggtgcatgaagacgatcccggtggcgaggcggtgaaccgtgagctgaatctgacctggcaaagcgagctgccggatcataacccgctgacggcaggtacctggccgccgaaaaccggcgaggtctcaatggatgaagggatcgccggcaggctcaagatcaaactgggcgataccttgacgttcagcggcgatacccaatcgttcagcgccaaagttaccagcctgcggcaggtagattgggaaagcctgaagccgaatttttactttatcttcccgccgggtgcattggacggccagccacaaacctggctgaccagcttccgctatgacggcgacggcaaggtgttaacccagcttaaccgccagttcccaacgctgagcctgctggatatcggttcgatcctcaagcaggtcggcggcgtgttgcagcaggtgagcagggcgctggaggtgatggtggtgctggtggtgatctgcggcggtctgctgttactggcacaggtacaggtagggatgcggcagcgtaggcaggaactggtggtttaccgcacgctaggcgcaggcaaacgcctgttgcgcggtacgctgtggtgcgagtttgcgttgctggggctggtggccggcatcgcggcggcggtgggggcagaagcggcactgtggctgttgcaaaccaaggtgttcgacttcccgtgggcacctacgccggtgctgtggtgggcgttaccattgctgagtgccttgctgctctcgctgtgtggcggctggcttggtgtacgcctgctgcgcggcagggcgctgttccgcagctatgaaggttaattttttactggctgtagcggtggtagagcaaggttaattacccctcaccccaaccctctcccacagggagagggagccgtacggggttgctatccggtgaaggagttgatctgtaacggattgatgtaaaggatgannnnnnnnnnnnnnnnnnnnnnnnnnnnnnnnnnnnnnnnnnnnnnnnnnnnnnnnnnnnnnnnnnnnnnnnnnnnnnnnnnnnnnnnnnnnnnnnnnnnnnnnnnnnnnnnnnnagcacggtaagtcctctttgggagccgtacggggttgctatcaggtgaaggcgttagtctttaacggattgatgtaaaggatgaataccgtggttaatttgtggcacggtaagtcccttttaggagccgtacggggttgctatcaggtgaaggcgttagtctttaacggattgatgtaaaggatgaataccatggttaatttgtgacacggtaagtcctctttgggagcnnnnnnnnnnnnnnnnnnnnnnnnnnnnnnnnnnnnnnnnnnnnnnnnnnnnnnnnnnnnnnnnnnnnnnnnnnnnnnnnnnnnnnnnnnnnnnnnnnnnnnnnnnnnnnnnnnnnnnnnnnnnnnnnnntcaccccacaagatcaccccagcttttgctgcgcccaggccaagccactttggtactcggctggcagcagcggcgctaacgcctgcaacgcctgttgcaaagaagctgcgtcgggatcgttgagattcaggtgacccactttacgcccctcacgcacctctttctcataccagtgcaaatgtaccagcggcaggcccagccattgctgattcaccgccgtgccgatcaggttgaccatcaccgaaggcgtattcaccaccggcttaggcagcggcagccccaggatggcacgtaaatgcagttcaaactggctgatggaagcgccgttctgcgtccagtggccactgttgtggacacgcggagccaactcgttgatcagcaggctgtcgccgacgataaagcactccatcgccatcacgcctacgtagttcaactcatcgaggatcgcagccaacatctgctcggcctgctgctgcaacgccggattgggctgtggcagcgctacgctagtacgcagaatgccttcttcgtgcaggttgtgagtcagcggatagaataccgactggccatcgtgaccacgagcgcccaccaacgacacttcgccagagaaattaatcccctgctcaacgatgcattcgccatagttatccgccggtaactccgcctcttggcccgggcgcaaacgccactggccacggccgtcatacccacccacgcggcgtttaacgatcgctaactcacccaaggtggcaaacacctgcggccattcgccagcatttgccagcaattgccaaggggcggtggcaagatgaagttgatcgagcagttgcttctgtgtcaggcgatcggccaaacgcgggaagatatcgcggttgacgaagttattgtgcgtcgccaattcgcgggtcagggcggtttctggccagcgttcaatctctgcggtgatcaccgcattttgatagggcaccgcttccggctcggcatccaggccgacaggataaaccgcaattcccagtggttcaccggcctggcgcagcatacgtcctaactggccgttacccagtacgcaaaccggcttcatgcgtcctcccgtgggtccgggtggttcagcacctcgtcggtctgggcctgacgccattgtgccaaccgctgtgccagcccggcatcgtgcagcgccagaatttgtgctgccagcaacccggcgttggccgcaccggctttgccgatggcgagcgtacccaccgggatgccacgtggcatttgcacaatggaatacaggctatcgacaccgcttaacgcggcgctttgtaccggcacacccagcaccggaaccagcgttttggccgccaacatgcctggcagatgcgcagcaccaccggcaccggcgatgatcacgtcaaaacccatggccttggcatgttcggcaaagctgaatagtttatccggcgtgcggtgggcggagacaacttcgacatggaacgggacatccagcgtggtcagaacttcggccgcggactgcattgtggcccagtcactttttgaacccattacgattgcgattttaaccccagcgttggcggctgaagtagcggtggctcccatgagtgcatggctcctgtgatgtggacaaacgtcggctggcaggccgtatgagggcgtagagcataccatgggtacagggcgaggaaaacggttgcgtcgacggtttttgccatcaaaagcgtgaaaacgacctagaaggggaactcgatcagttcgacggcatctgccgtgactttaatcattgagccttgtgtatgccaggctcccaacaccgcgcgatgggcttctccgtttggtaatgccagcggatggattgccgggcgatgggtgtggccgtggatcatccagtggacgttgtggcgcaacatggcctgctcaacggcctgcgggttgacgtccataatcgcggtggatttgtattggttgctttgttggctgcgcgcacgcattttagcggcgatcttcaagcgccagcgcagagggagcgcgagaaaagcacgttggatccaggtgttatgaactttcttgcggaattcttgataggcctgatcgtcggtgcatagggtatcgccatgcaggatcaggatcttgcggccatacagctcaacgacctgctcttcaggtagcaggatcataccgctctgcttggcaaagcgcttacccaacaggaaatcgcggttgccgtgaatgaagtaacaggggactccagcctggtgcaacgtcttgagtgcggcggcaatttcgctatgcaacggctcggggtcatcatcaccaatccaggcttcgaacagatcgcccagaatgtataatgcgtcggcgtgaacggcttctcgctgcaaaaaacgcagaaaaccggcagtaattgccggttcctgtgcgcatagatgcaggtctgcgatgaacagcgtgctcatgcagccgcgattactcgctgacggtaacgctggtgatcacgacatcttcaaccggtacatcctggtgcatgccgctgcggccagtttttaccgctttgatcttctcgaccacgtccatgccttctgccacttcggcaaatacgcagtaaccccaaccctgggagttttcagcacggaagttcaggaagtcgttatctaccacgttgatgaagaattgggcggtggcagagtgtggatcgttggtacgagccattgccagggtgccacgggtatttttcaggccgttgttagcttcgttcttgatggttgctttggtgtctttctgatgcataccaggttcaaaaccaccgccctgaaccataaagccgttgatgacacggtggaagatggtgttgttgtagaagccttcacggcagtagttcaggaagttttcaacggtaaccggtgccttgtcagcaaaggtcttgataacgatatcgccgtgattggtgtggaaagtaaccatagttttagtcctagcaagatgaaatgagctgtcacataggaaggcgtgtgagcaatcagaccgactttataacatatctcaattaatcagtcagcagtggctagggtggcagttccgggcagaaatacacgtgttgttgtcttggtctggattgggttaattccgatcgcacgcaattttctgccgatcaattcagcaatccttgggcttgaccttgcaatagagcagccttcgggtttcaatatgcggatatgtttgttatcacgcacaccacggacagccctgatgctaaagatatttaataccctgagtcgtcaaaaagaggaatttaagcccattcatgccggtaaagtcggtatgtacgtgtgcggggtaaccatttatgacctgtgtcatatcggccacgggcgtacctttgttgctttcgacgtggtagcgcgctacctgcgttacctcggctattcgctgaactacgtgcgtaacgtgaccgacgtggatgataaaatcatccgccgcgcggcagaaaacggcgaaacctgcgatcaactgaccacgcgtatgctggcagagatgcacgccgatttcgattcgctgctgatcgaacgcccggatcaggaaccgcgtgccacccaccatatcgaagaaatcatcgagatcacccaacgcctgttggcgcgcgatcatgcctatgtggccagcaacggcgacgtgatgttctccatcgatagcgatccgcaatacggcctgctgtcccgccaggatctggagcagctgcaagccggtgcacgtgtggaaatcgacgacgtgaaacgcaacccgatggatttcgtgctgtggaagatgtccaagccgggcgaaccaagctgggaatcgccgtggggcccaggccgcccaggctggcatatcgaatgctcggccatgaactgcaaacagctaggcacccattttgacattcacggcggtggttcagatctgatgttcccgcaccacgagaacgagattgctcaatccagctgtgcgcatgatggcccgtacgtcaactactggatgcactccgggatggtgatgatcgacagagagaagatgtccaagtcattgaacaacttctttaccatccgcgacgtgctgggctactacgacgccgaaaccgtgcgttacttcctgatgtctggccactaccgtagccaactgaactacagcgaagataacctcaagcaggcgcgcgcctcgctggaacgtttgtacaccgcactgcgtggcaccgatgccaatgcgcaacccgctggcggtgaagtatttgaagctcgcttccgtgaagccatggacgacgacttcaacaccccagaagcctattccgcgttgttcgatttagcgcgtgaagtaaaccgtctgaagagcgaagacatggcggcggcgaatgggttggcggcagagctgcgtaaactggccaaggtattgggcctgctgcaacaggagccagaacagttcctgcaaggtggcgcgcaagcggacgactcggaagtggcagagattgaagcgttgatcaaacagcgtaacgacgcacgtgccgccaaagactgggcgctggcagatgccgctcgcgatcggttgaacgagatgaatatcgtgctggaagatggcccgcaagggactagctggcgtcgtaagtaaactaagaacttattaagttaataaaaccgggttgctgtggcttcccggtttttttatgccttaagcatgggcttcgctgagcaggcgctggttgatgtaatcaatagcttgctgcggatccattatcttgttcacgacgttggtcacgccctggccgataatgatctccgcatggcgcaggttaaacaactcgccctgtaaaccccgagattcacgaatgccgatactaggattatctcgcagcaggttaaaccacggatagagatgcagaatacgctggttctgatagatgctgcggtgggcgctgttaccgcccaagagcaccagatgctcggtaatttcagccgaatacagccaacggaagaactgttctacctgcgccttcttatcactgaaacgagacatgcctaacgagccaccgcccatctgcggcatgttgccaggaactggcgcgtaaccaatcgccggtgatagagggctgtgggcgacgtcgttgaacagattcatatacatgatcagcatcgccaactggccttgctcaaactgggccaccgcagcattccaccattcactgttgagattggtggtgacggtaagctgttgctgatattgccgcaacgcttcgatggccaaggttgcctccagttgcaccggtttgtcttggtgcactagccgcccacctaacgcgtaatagcgcagtagatattcggtagcaattaacccggaactcccgagagtcgttgatgaacctatcggacgttgcgggttgccggattgatgagtcgccgtgaaaaaggctgtaatgtcatcaaactcggcgaaactggtcgggatcttcagctctttgcccgatttctcatagaacatgcgtttgaccgtggggtcttcgaacagatctcggcgatagaacagcaactgggtgctggcatcaaacggcaacgcataggctttgccgtcaatctggctgaaatgatggccaacctctgccgagaagttttccagcagttctggtagtgctggcgcgatctctgtcaacggcgtgagggcctttgccgcaaaccaggggaggcaggccatatcgatacgcagcaaatcgtaataaggatgcagatgcagattcgagaggatctcaaacacttcatcgtaaggataaaccgcgagattcaccttgataccggtctgacgatagaaatgcggcaacagcttcttcagcgcatcggtcgaggggctaggcaagatcagcatgttcagcgtttcaccctgctcagaaacggcgggcatgggttgaacgtccagagcaaagccacggctatccagtatcagctcatcggccagtgttgccaatccgcagatatatcgggcaatttccaggcccagccgggcgtaatccatctgatagtggtactgattggctaccacggcgggttcgttatcgctgagttgccagatcggtgggcagggtgctgcgctacccagataggccgcctgcgtcaggcaacgggctttttcactgtcttgagcaataagtacctgtggcggctggcctgcaaaaaaagcaaaagcggcggtgtgacattcactggccggtgacggaacgaccgttaactgggtcgatgggcttaactgtgccagcgtatctttcaatgcctcgacaaaacactggccgttggtataagcgaggggctcacaaagcacgccaacgtgcgtgggttgttcgcgggcgatctcgctggcaatggcctggcccgcctggcaaaagttcaggttgaatgtgaccttggcctgcgctggatggcgatagacaaacaggatctgctccgctggcagccggagcgtctgataatagctttcgctgtcggcaaggcaggagaccgtaacgatggtttggtaggattttgcggccagcgtctgcaagatatccctttcggcagagggcagatcgttagtgatgtacaaatccagatcgcccgagaaagaagatcgtaatgattgctgaagcccacggtagagctggtgatactgctcgctgttgatatcgggcaggatcagcgcaacgccactgcttttgctggcgcgtagcgactgcgcctgggcattgatctgataacccatttgctgggcagcctgtttgaccgcctcgatcttttcaacgctgacattgccgcgcccgttgagcacgttggaagcggtgccgtgtgatacccccgccagcttcgctatatccttgatagttgccattttcccaccgcttttagccgcctgttttgatgctaacaccggcttgggcgcttcgctatctcgatttctcttcaagcgtaaaatttggatcgttccatcattaattggttgttgtttgtccttaattaatccagtgtcacaaaattgatgaaaaacgtaataattaccaataattatttttatttagttgatttttatgaatattaaattaaatatttgaagccgatcaccaatatgtattgcagtgttaaccgttttttggtctcaggattattattgacacgttccaaaatcactttcgtcgatcactttaacgaaggagattggagcaataggtcagtaatatactgaataaaaaggataaaaaatgaaaatacatttcctgggatcggctgcctctgaagggatccccaatccgttttgccgctgtgaacattgccaacaggcccgttttctcaaggggaaagatctgcgtacccactcttcggcgattattgatgatgtgatgttgatcgacgtcgccccggagttcagccaacagctgttgcgtgatgggctggacgcaagtggtatcaccgacctgctgtttacccacacccatccagaccatttcaacgtcggtgagctgtttagccgcatggagggttacggcttcgatatcgaccatccattggagatttttggtaacgatcgagcgatcaacggctgtgctgcggtattgccgggctacagcaaacagcgctttggtttccactgcctggtgccttttgtcaccgtagaaagccatggctacaagatcacaccgctgctggccaaccacgccaagtgggagctttgctacgtgtatgtgatcgaaaaagacgggcagacgattttctatggccatgattcgggctggttcccggaactcacctggcagtggctacagggcaaagcgttggatttggtggtgctggaatgcacttacggtttcaacggcgacgatcgtaccgacaatcatatgagcctggaaaccgtgtttgccgcccaagagaaactgcgtgcgatggagtgcctgcatgccggcagccagatcgtggtgtcgcatatttctcacagcggcaagatgctgcatgaggagctggtggcggcctgccgagataaaaacatcaccgttgcgtatgacggcctgaccgttaacgtggcatagggggagaactcatggactttaacaagactcctcgcctgctgatcatgatgtttgtgcagtatttcatgcagggtgcctggaatatgacgatgggcctggtgctgagcacctacggcatggccgccattatcggttcatcttatgcgctgctgggattggcaaccatactttcgccgctgtttatcggcatggtcgcagaccgcttttttgcttcgcagaaagtcatggcgatcctgcacctgatcaacgccggggtgatcctttgtgtgccacagtttatcgaggcgcaggacaccaccatgacgctggtgatgatcttcctggtcgggttgctgttctatccgaccaccgcgctggccaacagcatcagctttagccatatcaacggcgtgaagtacttcccggtgatccgcgtgtttggcaccttcggttttatggcgataggtttcatcatcgggcagatgggatattccggcgataccatgacctggtacattgcttcggccgctggggtggcattggggctgtactgctttactttgccggatacaccgccgaaggccaagggcagcaccttcaccttgcgcgatctgctgtgcctggatgcgctgtcgctatttaaagatcgtaacttctccattctgatgctgagcatctttgtgttgatgatccccaaaacggcctattccgcctatattccggtattcctcaaagcgctcgggtttgataacgccgcctccatgatgcaggtagggatcgcctgcgaagtggtgtttatgttcctgctttcgttcttcctactgaaagcgggcttcaaggtgacgttgatgatgggcgcggtgtgctggatcatccgctcggtgctgttctcccaggctgcgcttgacgccaacatgacgtttgtcctgattggcctgatgctgcaaggcttctgctgggacttcttctttacggtgggggatatctatgttgaccgtaaagcacggcccgaaatcaaagcccaggcccagagtctgcgctttatcgtctccaatggttttggcttgctgttcgcgtccaccatttgcggccagatcttcaatagcaccgtgacggagcaggggccacaggcgttaccgcagtgggaaagcttctggctgttctcggcgattatcgccggcgttgtttcggtcttcttctttattttcttcaaggacgatctttctaaacagaaaacaccggcggcaatgaaacccgcgaagcaataggaaacaacatggacagctggttatcggtgctgggcgggttggggccgctccatctggcgacggtaggcaagatagtcgcggcgtttgttctggggggcgtgattggtctggaacgtgagtccaagggcaagcccgttgggtttaaaacctgcgtgatcattgccgtcgccagctgcgtattaacggtggtgtcgattcagtctgcggagtattacgccgagatctccgtcaatattcgcagcgatcccatgcgattggccgcacaaattatcagtggggtgggcttcctgggcgcaggggtgattttgcaccggcgtgatgacgccatttccggtctgacgaccgccgcgattgtttgggcatcggcgggagggggggttgcctgtggagccagtttttatnnnnnnntggggattgcctgtggagccagtttttatttgcacgcactcttggctaccgcactgtttttactggcgataaagatcagcccctatattttcctgctgcaatcgaggaatcaatatctggggaaggtcaaagtacggctgatacttgatgagcaggcagggctagccagcttgatggcccagcttaatcagcaaagaaacctgattgatgcaatgaccatacgtgacgtcaaaaaacacaagattgaagttaactttaagctgacggtaaggaaaaggacgaccctggacgaactgtatggctcactgcgcgctatgcaacacgtgagcttcgtcgcattggagcattagcgggtttgagtggatcaaaaatgccgggtagcttagccgacccggcatttttttgctggcgcttgaacaatcaggctttaaccgtgacgttcatgcctttgtagctgaccttctggccatcaacgatcttgcagcgcttacgcgtttcgacctgaccgtttactttgacctgcccttcggcgatcacttctttcgcggcaccgccgctgtcacaccagccctggaacttcagcagatcgcacagttcgacatgagggtgaccttccagattaaaaatttccatactgccttaacttagttaggttgaacgtcgtgaaattcctcgcaggcttgcaaggtattttggatcagtgtagcaacggtcatcgggccgacgccacctggaaccggagtaatgaaggccgcacgttcgcttgcggcttcgaagtctacgtcgccgactactttaccactttccaagcggttgatgccgacatcgatcacgatcgcacccggtttgatccaatctcctgggataaacccaggtttgcccacggcaacgatcaacagatcggcattttcgacgtggtgacgcaggtttttggtaaagcggtgcgtgacggtggtggtacacccggccagcaacagctccatactcatcgggcgaccaacgatgttggaggcacccaccaccacggcgttcaggccataggtatcgatgttatagcgttccaacagggtgacaatgccgcgtggggtacaagggcgcagtttaggtgcgcgctgacacaggcggccgacgttgtaaggatggaaaccgtctacgtctttatccgggctgatgcgctccagcaccttcacgttatcaatgcctgctggcaaggggagctgcaccagaatgccgtcaatttctttatcggcgtttaatttgtcgatcagcgccagcagttcaggctcggtggtggaggcgggcagatcgtaagagcgggaaataaagcccacttcctcacaggccttgcgcttgctggcgacataaatctgcgaagccggattctcaccaaccagtaccaccgccaggcccggcgcacgcttgccggccgccagacgttgtttcacttgctcagccacttcgtttctaacctgctgcgcaatcgttttgccatcaataatctttgctgccatcagtgaggaaatccatcatttaagaaaagcgggggatggcgctattttggcagaagagaggcgcgctgtcaggctttcgatcgggttaatgcagagaataagcacacgattgcgtagcggtttatacattttttacaccaacggaatgatcctctacgctttttttacctccagtcttttaggctttacccattgcccctggcgtttggggtctatggaggcaggatcatgcagacgattactcggctctatccattgcatcaacctggtggacatccagcagatgaacagcggcatattggtgaaacggtgtttgattcctccctgcatccggcgcaggtggcgttgttgcaggcattacatcggctttgtaagccgaaggagggtcgcccttcctggagtcagcgtatggcgcagtggtacaaaaggggccaccaatgatgcgtagcgttcctttagtgctggtattgctgcttgctacgccactttgtcaggcatcgatgaataccttggcagccagtgagttgcctagggcaatgctggcgcagacctgtaatgtgctgaatgccccgcaggccgattggggggatatcaacgccgtggtgcgatcggcacgtgcctgtatgtcgcaaaaagcagggcagagggcaaacccacgcccattggcacccacggttgaaccacaaggggttgatgagacggtattgtggcaggggattagcgtagccagatcatcgcgttagggtgacttatcatggtttttgtgtgcgaaaaatcgccataaagcacctctgccaccaccacagagtcaaaaggcattgactcaataacctctgaccgtataatccaactccgcaacctcggttgccgcatccgcatttcaatgcgcccttagctcagttggatagagcaacggccttctaagccgtaggtcacaggttcgagccctgtagggcgtaccatttttacttctcccaacgtctattaaaatctaccaaatactcttaggctgcctgttacagctgatatcaccgtatcccaacgtctacctggttctactgaaatctacatgcatgtgggggtatatctggtggtatgttcaggttcaacgaagttggtacccccaatgaagttaaatgcccgccaagtagacaccgccaagcccaataagatgacgccgtagtgtttattcctgtacgggatcatttcgaagtaaacagacgtcaaccgacgtcttttttatgccctggtggatccgaaaagagatgatgatatcgcctcttcaaacagcgtttcccgcccacctgctgcttaagagaacaagggtatatacttgtggtgtacggatatattctggctcggggaaatgctcccagtctcggtgcatgaccaccgttttcccttttcttcctcaaccaaatcaacaaagtaaaatcaaaataagaggatttgaccatcatgactcagatttttactttaacactttctccttctctcgatagcgcgacgacaactcccaggatctaccctgaagggaaactacgctgcaccacccccatttttgaacctggtgggggtggcatcaatgttgcccgtgccgttgtttatcttggtgggcaagccagtgcgatctttccaattggcgggccaacgggcgagcatttaaaagagttgcttgatcgggaaggcattgttacagaaaccctgaaagctcaggactggacaaggcagaacctgcatgtccatgtggataatagcggtgaacagtttcgctttgttatgccaggggcaagggttaatgatgccgagtttgaccagattttgttgcaggtgcagaagatccctcatggttcgattctggtgattagtggcagcttgccaccgggcaccacgctggcaaaattaaccgacctgattaagcaggcgcaagccataggattgcactgtatcgtcgacagttctggggatgctttacaggcctgcctggatgtaggggggctggctttggtaaaaccgaatcagaatgagctgtctgcacttatcgggcggtcattggagcaccctgatgatgtgcgagctgccgctaaggagttggtacaacaggggggagctgagcgggttgttgtatcactcggccctcaaggagctctcgccgttgatagtgacacctgtatacagatagtcccgccaccggtgaagaaacttagcaccgtcggggccggtgacagcatggtaggcgcgatggtgctgaaattggcgaacggggcagacctggtggatatggttcggttcggcgtcgcagcgggcagtgcagccacgcttaatcttggaacgcggctctgctcactggcggacacccagcgcctgtatgactacatctgcaaaagttcgcgtggctgagcctggcaaaccaggcgacgcgggttattttgcaataggattaaccatccgtaagccgctgtgcggactcccgagaaggtgcgtaaagtggttgtgaaaatgctggtgggttaatttccctcgcccggtggcgctcgcttccgggctacaacttttgtacctcgtttcatcatttcctgatccagactaaaaaattgccccttgctgatttttcccggtttacctctccgcacatcgcggcatagcatgagagctaaattaatgaacgacgttctataatgtagaacaaaataggtcagcaaggagatctcatgcagcataccgcgcagttctcggggattactccgcctgtctccaacatttttaacgccgatggccagttaaataaacagggtaccgccgcgctcattgacgacatgattaacgccggtgtcgacggactgttctttttaggcagcggaggcgagttctcccagcaaagcccccgatacgacaggagccttctaccttaaccactatttgcctgatcatgccgatgaagttgtttcttctccgccatataccccgtcagccacatcgccaggcaggccatagccgccactacactcagatgaggttactgaattattttgtcacgaatactatcgaggtcaactcagtcatacccaaatcaattggggattgaggcttttgagggagaacatctcattcgatggaaattagctgtcccctaaccactacttcttatacgtcgacgatattccgatggcgttatccctttaaaacgccgaaatgccctgatgacgttattcgaatgcccgaaccctactttttccgctagtaaatataacggttcatccgtgttgacaagcaattgttcaaaatgattcattctggtacggaaaatatacttatacggtggcataccaaaggtatttttgaatacgcgagaaaaatgaaacttgctgagtgaaaccaacgtcgccatctgatcaagggagatgggcatatgcaaattggccatgatgaaatctcgtaacgtcgcttccctcgcagaggaaaaaactccgcccgacctcactttgctcactatgagttccgaatggtttttcagaacatgtagagagagaagtgatgcaatcgcatcagtatataagcttcctagtaagctggggctcgccatttcttcttgtagctgaaaggccaatttcagcatcaaatcatctaccacacccattcttggtatcaatgttaccgtagtgtttctagcgtctattccctgagcctcttcttccaacgaactcactggcaacaaaattcgataaatcagcgactctttcgaagaaaatgactttttcccccaacgccatgcagatccatttctccctgctggagctatgtaccattcattgtttcttttagaatatttgcgccatggttcctgattaaaactgacttcaccgtgttcagtctccccacagaacagcaccaattgatgttgtaccgttgcaggcctgaggcattcatccacagcgaaaggctgtttgtgaagcatggacgagatatttagcccatcacagtgaccagagtctgagatcacatcctcgggcggtaacttaaagagttggttaaccgcaatatctttttctactccacgaaaattgctcatcttatgcttccctattactaaggatcctgagcataagtgtaacatctgtctataatttgttcttgttttttagtgtatcctgataaggtcttggcttatggttgaaagtaaaccaagctaaaaaggccgctatgatacagagaactaacgaaatgtaggcaattgaggtgaacccttggcgattgaatatatagccgtacactagcccaccgatcatcgttccactataagaaagcgcgctgtacatgcctagcgtggccgttttgtaagaggggcttaattggatcaacaaacttacgattacattcaaaccaaaatgatttgccgctccccaaagtaagcaagccacaaacaacagataaatgcttgatccactcacggacaaaatggaatatatcagcgatatagtaataaaaataatgtaggctgaggattgagggctgaatttatcgatccaccgagccttaaggctggccacaccaaaaccaatgccgtaggccatggtgataagcccagccagagcggcactattataaaagctgtcacgggcaaatgagccaacgaacgagtagagcccataaaatgacgtcatgtagagcaacgttacaacgaacataatcaaaatatcaggatttttacgatattcttcaaacggaaaaccaagtttctccgctggtgtatcaatcactggtagccttttgctgaacagtaagaacaccagccccaagaccgccattaatccataagccactcgccagtttgttatatcggcgaacactgcggataagggaatacctattaccatggcaagcgaccacccggtgatgactttgcccagcgcctcagacttttccccttctggtgcaacatccgatgttaacgtataaatagcgggcagcatcaaaccagcagctacgcctgttaatgattgagcaatagtgagcatccaccaggatagagagaggccgctcaggacaatccctacgaccatcagcatacctgcataacgtattgtacgcgtaatacctatttttctcgcatagggtgctagaaatagtgaggaaagcgccgtagcgccaccataggcggaaatcgccctggatatctgtgccgtagatgcagagaggcttgatgcaatatcgttcagaatcgggctgattaagaatgaattacaaccaatgatcgccactgcgaccattaatatcataatacttcttcccgactctttatttgatggcataattcacttccgatttaggatttgtatttttatcgtgttgctgtggtgatattttatttttgtaaattctccctcctttcataattagaagcaaactttcctgcgcactgagtactgtgatatcctcagagggatctctatcgtaaataaggaggtcagccagtgctccttcgcgtatcacaccgatttggcccaccaacccaagcgatatggcattattagtggtacaggcctgtattgcctccagattcgagtatcctccatatttaaccaatagcgcgggttctttagcgtgatgggtaccataggtcataaccggtgaattacctgtatcggtaccacacatgacggggataccaaacgccttcagtttgcctacgttctttacggcgctatcgaaattgctgcggatacgtgataactccttatccggtatcgctaatctctcagcgcaagaaagaaaggtatccaaacccactaaacttttcgggcatagatggcctaatgattttttcataatcctttttagtaaaatcactagcaaaacgcatggctaaagcagatgcttccatcatacatgatgcatcacggagagatttcccgccgctatccctgttctttttatgatagaatcgttcaatattcatcagagccattaacgtactttggataaaaaggaaaaagacctgatggcccactttccatcttagtagtgagggatgagtcatacttcctcctgaacagttttagtgtcttcattgagatattccacaccaatgaaaacagcgctaataattttagaaattaactcatcatagtcatggtgatttaaggacgaaccgtgatgacttacgttgtcaataaaggctatcgcacattccaccccgttattaatatgagtttctagcggttttccatcaactctctttacatcaaagtaattatcgaagattctgaactcttcattggattgaaattcctggcattgactagtataatttaatttatccaaggcgtggtggcaactctcgagtaatgaaatgctgtcatcgccaaggcctgtttccaactctttaatggtggaattgatcgcgtcactttttcgcacgttacgataattggatatgagtgctttgggtgtcgatagtaaaatcatattactctccttagtgatcgaaaacagtagcatgatttaataatagtctttttttgttaatttagttgttcattcttgctcaataacgctctcatcttgcttaaaatgaactttactgatatttattttgttaataattgggttggatagcctcgaaaactcatgttgcttcacgaataaagcgagggtatgagcaggaaagcgttgatttacatcaacgctcactgaagttggatatcgacaatattgtcagcaatggcgataacgctcgggtcatgctccacaaccagtacggtgtttcccttgccgcgcagttccttcaggatggtgttgagcttgtccacgtccgctgggtgcaaccccgcactgggttcatccagaatataggtcagttcggtcaggctgcagcccaagtgccgcactatttttacccgttgtgactccccaccggataatgttgacgtttgcctgccaagactcaggtatccaagcccgatggtgataaggtgcccaggctggtttttaccgcatctagaataggtaacgctggcgcggcctcctccagagtttcaatttcacttaaaaatataatgaggtcgctgatctgcatggcactacagtctgcaatatttttaccgagaactttaggttcctatacggagggattaagccttgcaccgcggcattccgggcaaatcccgctagttacgatacggtcgaattcatctttgtacataacctcgctttctttggagtcacgtttgaaaaaagtccgtgtgaatctagggatgatgccttcgtaccgcgctgatttgcgccacttaggtgatggattggtgagccttataccttctttattttcgtagattgagtagggacagtactacagggcaagcagttagaccaccaatgacaaaacggccacgcatggttgctgctagcggtcgcagcattaaaagacagtaatggcaacatatcctcagccattggcattccacaatggctgaaggtgaacgtaaaaccccggttgcgtttgcaatatgccaggagatctccagttcatccccatgtccctcagattttcgtacagaacctaaagactgaaaaactgatctttgccccgggctttagctacatagagagctttatcggcatgtgtcagtagtacgttaggcgagggcagttggccaaatgtatgaactgaaaaaccgacgcttatagtcaagtatcctgtgctggatgcggagtgcggtattctcaaatctcgcaccagttggcatagcgtctgcacgtacagcgttgcctggcctttcgtcatgccattggaaagaatgacaaattcttcgccgccatacctggctacaaaatcagaaccccgcttgaaggacttactcaagcaatccgcgacacgtattagcgcttcatcgcctgcctggtgtccataaatatcattgaatgatttgaagtgatcgacatcgatcatggcgagcgtcaatgagtcgccattacggatggcaattttgcattgaatgtcgaactgtgtatcaaaaaagcgacgattataaatcccggtgagtccatcctttatggagagttgctcgaagtgtattttcatttcctcgagggaccgatgctcatcacgaagctgttgctggattatcattcttggtgttacgtctttttggatcccgataaaattggttacagtcccactctcatcatgaattggcgatatgcttaactcgttccaaaacatggttccatccttgcggtagtttcgcaaggttacaaggcagtactccccttttttaacggcgttgcgcacaatctccagctctggctgttcccgatcgttattttgtaggtatcggcagttgatgttggtgatttcttcgaaggagtagccggtcattctctcaaaagccggattgacaaaaatcaaaggattgtcgtctatgacattgtcagagatggtgatgccgtctcgtgaatccataaccgcctgtttaagaatttcaatcttcatacaaagtccgttagtgggatcgtagggagaacgttgttggtaagcaacgtagcatcaagagatcacacgcgatcaaaccaattttacaagtgtagtcgttgagaaggggccgtgtccgttttttgaccttgttacaaacgttcagataatgagataacggctgctcgggtcaacgcccggctcttaataccccagcacaacggccgtacgggggctagacaggctcatggcaaaacgtagtccgttcattaacaggctattgaggtgccaaaaattactgatccaccacggactgtatagacgacatgatgcgcagttttgctcatttggatggaggaggagttagataaatcctaacaatgaagttagcgtatctatatgaataatattgtgaattttaccgcaatggcagaaaaatccgataagattgtacattcaatatatttggctaataaaacggaataagtgaaattggttgaaagattcatttttaaaaaatcaagtagatataaactctgttattcatgttttttaaaaataaaatctcgattttcatttttaattgatgggattttcattatttagaatggattgttatgcggaaatttgcagatataataggctcacattatgggtggtttttaagatctaaaaattagccgagatagttatggaagataatttgcatggattcctaatcgatgaagatatttatttcaatgttaatcatagaaggctgatgtatttcatcaatgaaggtgaggaacagctattgtctttcaggcttgttcttttaaatgaaatgcaaacgcgattattatcatttttacttaagaatcgaaaaatcgaagtcatcagcaaaaacaaaataatgaaaaatgtttgggatgagtttggtctatcatcatctaatcaacggctttggcaagaaattaaaaagataaaaggcaaattgttatcaatcggtcttcgtgatgacctgataataaacgtgcgtggtgtcggctactcggtagataatcagagggttaaatctttacttatcgaatgagtttctcctgtaatttataaagtatatatagatatatccatatcacatggatgacccctgccattctaatggatattagaatggtttaacaacacaaggtatgtaggaatatatatgaaaaagttaaccatcgttgcatctctcgtcgctttatttggctctgctggcttggctcatgctgcctctactggaactatcacattcaatggtgaactgacggcaacaacctgcgacgttattgttgacggtgaagcggccgacgcaaccgtgacattgccaacaatcggtaccaaccaactgacagccgctgcacaaacggcaggccgtacaggcttcaacatggcactgagcaattgcgcaggtactttgaagacggtttctgccttcttcgaagccggcacttctgttgatctggtgacaggccacttgaaaaacatgggcggtacggcgagcaatgtcagcctgcaactgcgtgacggttcaagctccactcaagctgtgattcaggcgggtaaccagaaccagagactgaataccacctatgttccttatgacctgactgcgggtactgccaacctgccatatgccgttgagtactatgcagacggggcaaccactccaggcaccgtaaagagtagcgttgtttattccattcagtacaagtaatacgttggtgggagggggaaccctcccccattcagcatgtcagcaaggagctaatcatgtcgtcttttccccggcatatctatcatgccttcggcctgttggccgtggccctctttacgaccagcagcctggccagtgtggtgatcagcggcactcgggtggtctatccgtctgacgctaaagaggtgagtgtcaaactcaacaatgtcggtccgtcccctgtgctgatccaaagctggattgatactggcgatgtcacggccaaacccgccgctattcaggtaccttttgtgttgaccccgccgatgaaccgtgtggaacccagcaaaggccagaccttgcgtatcagctacaccggtggtgcactgccgatggacagagaatcggtattctggctcaacgtgctcgaggtcccggccaaaaaagtggccaaagccgaggaaaacttgttgcagatggcgttccgctcgcgcatcaagctgttctaccggcccgtcggcttggtgggtaacgccaatgatgccgtcaaagctgtcacctggagtgcaaaaggaaatagccttcaggccatcaatcccaccccttatcatgtctcctttgcgagcattaaggtgaatggtaaaacggtggaaggtgagatggtggccccgcatggaacacaaacatttacgttgtcagtaaaggcgggcaataacgtgaccggggattttgttaatgactacggtgcagttaattctttcaatgccatcattaaataataatttagttgcataaacactctattcggcgtgacaggattgtcactattcatgaatgagttatgaagggatgcgttatgtcaaaaaaattgcagtatggatcccagagaaaattaacccctctcgcgatggctatcttatcgacgtttatcgtgggtggcgccagtgctgataataccattagtcctccgaccgagatcgcaaagaatttggagtttgatgtctcattcctgaatattgatgatcaaaagtcagtggatcttagccgttttgccaatggttctgcggggttgcccggggtatataaaacggctttatacattaataatcaactcgtcagtaataccgacatcgaattcaaggcacgggcagataaatccgtgtatccctgtctgacccgcgagctgattaaaaatataccgttcaattatggcagattaccgccaggttttttagacccgcaaggccagggcgaactgtgtatggatctggtgagtaaactgccggaatctaaagtcaattatgacagtaatgaacagcgtctggatatcatgatcccgcaggtttacacgctgagtacggctcggggcaccgtgagtccggaactgtgggacagcggtgtaccggcattattgttgggttacaacgttaatggttataccagcgagtcgcatggcaatacctttaattccatgtatgccggggtgaacgctgggctgaacgtcggggcctggtatctccgccataacggctcctacactcggacggacaacggccagaaccagtacaccagtctcaatacttatctgcagcgcgatatcccgcagctcaaggcgcgagtgctgatggggcagtcgaacaccaccggacaactgttcgatacgctgccgtttaccggcattcaactggcgaccgacgatcggatgttgccggagtctctgcgtggttacgccccggatatccgtggtattgcccgtaccaacgctcgtgtcaccgtacgtcagggggggcaggtgctgtatgagaccaccgttacccccggcgagtttctgatcaacgatctgtatccgaccgggtacggtggggatctggtcgtcaccgtgcgtgagtcagacggcaccgagcagaccttcagcgtgccgtatgcctcggtggcacagctattacgcccaggttcatcacgttattcgatcactgcgggtgaagtacgcagcgataatctgcgtaagaagcccgcgctttaccaggctacctaccagcttggattgaccaactccgttactggctatggcggcatgcaagccagccaggattactatgcgttgcaactgggtgctgcggtggggacacccataggggctttggcctttgatgcctcacaggctcgtacccatttgggtaacagcaccaatgtgaatggccggcatcagccgggtaacagcctgagcgggcaaagctatcaggtgagctacagcaagctgatcagtgaaaccaacagcaacctgacgttggcggcataccgcttctcaaccagtggctacatggatttcatgactgcgatgcagacccgtgatgcggtagcgcaggggttctcgcctgattctatctggcgggcgaaaaaccgcctgacggtcaccgccgcacagggattgccagaaaactggggccagctgtatgtcagtggttcgttgcagaactattggaacaaagacggcactgagaagcagtaccaggtgggttacaacaatctgtacaagagcctatcgtatggcctgagcatcaaccgcagtttctccagtctggccggatcacagaccaactatttactgagtttcagcctgccgttggggcgtaacgatgaaactcacacgccgcagctacgcatggatttatcacatgacagcactgggcgttatggccagcaggctacggtatccggaatagcagggcaggataaccagtttagctatggcgtgacggcgatgaacgccaaccagggcatgggttccagtgggtcgctgagcggtagctaccgcagcccggccacggcgttgagtgccacggccagcacaggtaaaggttaccagagtgcgtcggccgggataaacggcacggtgattgcgcatgcgggtggagtgagctttacaccgtatagctcggatacctttgccttggtggaagccaaaggagccgaaggggccaaggtctcctcgtatccaggggtgagcattgattcacgtggctatgcggtagtgccttacctgaacccgtaccagatgaatgaggtcagtatcgatccggcaggtacggcggccaatgtggaactggacaataccagccagaaagtggcgccgtattccggagcggtggtgaggctgaaatacaacaccaagcggggcacaccaatcctggtgaatgcaacctatcaaggagagccggttccgttcggggcagatatttttgacagcaccggcaataacgtggggtcggtgggtcagggcgggcaactgtatgcgcgggtagccgaagataagggccaactgcgggtgaaatggggccaaggcggcgatatgcaatgtaccgtcaattatatcttacttcccacggtcaaagggcagcaacagagccagatacaaagatttaccgcaccgtgcacggcgggcacaccccccggtatccataagtcgaaattggcaaagaacaacacagaatcggccgttgacaacggttaaccgtcgaagcatcaaaactattttttttctggctaaggcccgctgggcccggccagagagaggggggaatgacgtatgaagttatcgatcaataacgtgtcaggtttgctggggggagttttgttaacggcagccagccctgctagctgggccgctgtggccgtgacgctagacaccggagtccaaacagtagtcgttcccttgagcccgccgcagatttcggccggggtagatgtacctgtggggaccgtgctataccaggcgagtctgattatgaaagatgggacctttaccataaaatggcctgcgtcggatgttggaaaatacttttattatactagctcagcgtttgtatcaaatactccgcagccttctgctaatctgacaacgggcccttatgcaggcggggtctatcaaaccggtattcccggtatcggcgtggcaattttgagtgcctcgggaacccccataacaacaaccaagctttatgctgaggcgcagaatcttcttgggtcagaattagctggactacttaccgaatcaggtgcaagcaacgtacgaaatgtcgcactgattaaaaccggcccacttacacctggaacttatattgcgagcggcgccaattttcctaccgttacgcagggtctggatgtttcacaaaccagccacactaatgctgccgcaaccagtgggttaccggtatataattggattttcagctttcaagggaatatcacggtatcagcgcaaacctgtacgacgccagatgtcgctgtgacattgggaacttatgcaatagctgagaattttacagcattaaattcaacaaccccttggattgatgcctctgttgccctgattaattgccccaaattctatggtttttataattcgactaatgcgccattgttaatgaattacaatactggaacaggcacctcaacgacctctcttaataacactattggcgtgcgattaaccccggcgacgtccgtagtggattccgtcaacgggattatggccatcgattcgacggtggtcggggccgcttcgggtgtaggcatccagctcggttggggagagagcagccaaacgccgacgctgtttaactttgcggcagaacaaaccataactctacctaaggatggcacttcgacgattcgcgtgccattgtctgcccgctatattcaaaccgcgaccacgcctacaccgggcaaagcgaatggcaaagtgacgtttaccatcaactattattaactataaaaggcgacaccgaaaaaataaaggtctcgagtgtcgtcatatgttataaaaaaatcaatactgtctagaggcttagcaagccgtcggcaagtgtttatatcacggatttcacatataaaccataaggactaatggcatgtcaataaatattaaagtcattactgaaaattattatttcttcatcgggattaaagaatatctccaaaacgatgaaagagaagtgagccatatagactttcatgaattgaatagcaccccaagaaataatttaaaaagtgatgacgtatacattttttacacattaaattatattaatgaaatcttactcttgatttcaaccaatcctcttcctggtcggctgattgtcattccagtcaataataggtcaaatttcaacattgcttttgaaaagaacattttactggatccccatgcaagtgttaaaaatattctagataagataactgaggattttgaacatgagaaaccgcctatagacttgcagaaagggaagttaaccaaaagagaaaaaaccatactcactcatacgattaatggcatgaatgccacttctattagccagtttttatgtatctcgataaaaacagtctatacacacaggcggaatgcttttattaagcttggggggaggaacatgttcgaagtatggccagtgagaaaagaggtactcaggatggcgatttattgattttaccctcttgagcgccattttgcagctttagcaacgatatgggccatcgccgtgtgggccgatggcgccaagcatcctactgataattggcttattggttttgcttttctgtcgccagcgctggctgctccacctccagcaattcataaatcgttttgcccaccttttggatcgcctgttcaatctcgcgggtcatgggcttgctgtagctgagccggaggcaattgcggtattttcctgccgcagaactgataaatccgacggcaatctgtatgccctgcggcagcaaacagcggttcaggcgcaggctatcgaacccataaggcagctccacccataacataaagctcccttgcggcctgctcaggcaggtattcggcgggaaatacttcatgatccaacccgtcataatgtcgcgattacgttgatattggcggcgcatgcggcgtaaatgttgcaggtaatgcccttgtttaatgaattcagccatagccaactgcggcaaagtgggaacccgcccggcggaaatgtacttcatatgtaatgctttttctaagtaacggcctggtgcaatccagccaacccgcagaccgggcgcaacggttttagagaaggaactacacagcaagacgcggccatcctcatcaaaggaggcaatagttggcgggcgtgggtattgataagcgagagcaccatacacatcgtcttcaataatcgccacgtcatagcgttgagccaacgtcaacagcgctttcttacgctcattcggcatgttgtaacccaacgggttattgcaggtcggtgtcaactggatggctttgatcggccactgatccagcgccatttccaacgcctccaggctgatacccaccaccggatcggtggggatttcaatcaccttcatccccatccctttcagcgtctgcattgcaccatgaaagctgggggaatccaccgccacaatgtcgccaggctggcaaacggcccctagggcaatcgccagtgcgccatggcagccagaggtaatgatgatattgtctgccgattgatggttgccgctgtccagcatcaggcgggcaatctgctcacgcaacgccagagtgccgtaaatactgtcgtaatccagcacttcctcgctttgatgcaggctgatacgggcgagcaaacggttgagtattttcaggcctgggccagacaggtccggcgtgccgacgcccagatgtagcacattgtcttgagcgctagcctttaaaaactccagcgtattttcccactgagatatctcgaccggcctttgtgcatggctgcatagcgcggggagagcaggcagatttgagctacaacgcacgaagtatcccgatttcggccgcgcctcgatcagcaggcattcttcaagttgccgatacgcctgctgtacggtgctgatactgaccccgtgttcgtcactcagcacccgaacggaaggcagccgctctccgggcacatacagcccttctttgatgcgttggctaaggatattggccaattgttggtagcgagtcatggatatcacctgataaagagaagggaccagtacagatggcgctgatttttaccattcagactgtttagcacatatctgtatgcaaataatagccagcttttgcatctgtaatgtttttcaccgaagcatcatgctaaaggctcatcgactgacggggagctgattatgagtaatgttattgaaaatcaaattgatggcggctgcttgtcagctgaggaaacaggaaataaacgccgtaatattgttgtccgtttatggctaaaagcatacagatgggtaaagcgttggaatgagaggcgcaaagcagccaatacgctggcaagactgaatggcgatcagctaaaggatatcggtctacgccgggatgatatcaagcgagactacagccgtccgttctggcgttgagccgggttaaagagagtggaacatgagagggggctatagaaacctcatctcagcggcatgctgcgccccataacgggctcacacaaaaaaagaggtggcaaagactaccgccaccaaaagtcaaagtcataggaaaaggaaagcttaatgacaacgtggcaatggctgaatttgtaaggggcgcaacatgtggcgccccttgcgccatcgcagcctcgttaagggtaaagtttatatttctcgcgcagttgcaaatagctatccaccccgggttgccactgggcctcgatgaatttaaccgtttcatcaacagacagctttctttcgcttgcgtcattcagcaacgtaaccagcttgctggtgccggtgagcttggccagccactgggggcgtatcaagaagaactcctcctgataatccaggtactgcgcttcttttgcagcagggagcaccatctcatagcccgcagtcttgaacttgaaccaccagtcgaccagataacgtatcgttggcttaacctggccgatgtcggtagcggtcaaaatctccccgcacacttcctttccggcctgtggccagccggttttctgctggttgatatccacctgatagcaggtattgacgtaaaactggcgcgtaggaaaacccagttgttcaaatggatggtctgaacctctgcccatattaacgctggtggcttcaaacaggcccaaagaagggtagagctggatggccagatcgctgcgcaggttcggcgatggccgtactggcagtgaataaggggtgtcatgggtatagttagccatgccgatcaccatcaggtctttagcggggaactgatagtctttgatgccaaaggcctgccagttggtatcgttgaaatttgtcagccaaccctcgccggtgatcatgcgggcaaactcccccgaggtgagcccgtgcaccatcggtatcggatgcataccaatccccgagatgtttgcctcctcgagaatagggccatacacatggctgccgagcgggttaggccggtcgaataccatcatttttttatggtatttttgcaggctttccagcatatggtgcagggaaatggtgtaggtaaagaagcgaacgcccacatcctgcagatcgtaaataacgatatcgacattggctaactgtgcctcggtgggatgggctcgagaccgcccatcctcatcccggccatacaaagacacgatcggcaggccgctatgtttatcgagatgattatcgtcgcccagcccggcatcggcattaccgcgaatgccatgttctaccgagaacagagtggtcacggtgaattgatatttttcctgctcggcgagcaatttgtcgatggtgtgccggccctgtttgttgattgagctttggttcaccatcaggccgacgcgctggtttttcagcagtggcccataggtttgttcctgatcgacgccgagcactatgcctggtacagcgctggcatagacagcgctgatgaacgacgagcacaggaataacactgtcagtagcagatgcctcattccttatttctctctgttaatgggatcaattgcccgtcagaagttatgccgcagttccagtgcccagaaccagaagttgttgctggttttatcaccgttcatccaggtttgttccggacggtaataactgtcgacaaacagcgacgtttgtttgttaaacggatagattgcctggaagccgtaacggctacggtctttctctttataaaccgtttcctggtttctggagtcgcggaagctttgcgtccctttagtcagtgccaggcgggtataaggcattaacatcacgccactgtcgaacttgtaacggtaaatcgcccacaggaaatgttccttgttatacagcgtattgaccagttgctcatcaatgtacagatagttcagccagagggaatttttctggttaaacgtcaggtttgctcccgcaaagtgctcattgatctggctccaatcgcgcttgtaaaccccataatcccctttggcccgcgcataatccaacttgcggtcaatcaggcggaaagagaggctggcattaaaactcaggctatcagagtatttgtaataggcttgcggacggatccagatctcgtgccgctcctcgcccttgcggatatcccctttgtattccggtgctgccagcgctgggttgctgatggacggataatgccagttgtcgttacgataaccgaggcgtaatttggtgttgccagtttttcctcccaaagtgaagggaaacgttctggtgacgcctgcctgccaacgtgtgcggtcatattctggcgtattgtccagataggttttcaaaaattggacatcatacagccacaatgaatcattctggtaaataaaggcaccgacataaggtgaggttgctacgctgccacggatatatttccagcggtcgtcactgtctatctcctgctcggtgccaatataggtatcgaagcgccaggtttgttgtttaagtttatcctgtgcttctttcttttctttttctatttgctgaatgcgtttattgagtttgatgatctcctgatcataatctgtctcagactcatcagccaataccggttgtgccatgagaatagcactgaaaatcactagccctgttaagatcttcatgttttaccttcagagatattataatgccgttaatccgtaaccgcgtgggtagagcacgttattattatctggtgttttaatatcaaccggcaatttaccatgaggcgttgcaaggctatcccctgcaggccccttgaacagcgttcttaaaccactgcgaatgttggtttccaggctgttgcggacgttattggtcacatcaaaaccggtgatgccataaatcgcaatattggcctttacgtcagataaataggcaatgtcatacgggttgcgcgtagcaataactaccagaggaatgttttgcttattggcgacgtcgatgatgcgctgggcattgactgggttgagcttcaggttgtaggtggccaggataaccaactgctgaccttgcagttgctgctcaatttcttctgtcgttaatgtatcctgatccagcttaaccacctgatcctttacgtttaatcccactttcaactcattggcaatctggcccagatgcttgttgattaactcattgcgtgggccttcgtccgaaaagaccatgatgttgttttgtggtttcagcgcataaggcagaacctgctcatttttgatcagcgtaatggcctgctccgaaatggcgttttccagatccttgtgcgccttggaggcgacaatcctttcagccgtggcagtatcatgaggcgcaggggagatgcgcttactaagcttggtataaatcacccgctgcgcagaatcttcaatgcgttgcttcagcaccggatctttctccgcttctgcctgcaaataagcatacagttcgccgagttgttcaatgctggcgctgtctttaatccctattggcatcaagacgatatcattaccggctaaaatagcctgcttgatggaccaatgacgatcaaaattgccggtaatggcccccatgtccatggcatccgtcaggatcagcccgtcaaacttgagttgattacgcagggtatcggtcaggatcgctttggataaggtggccggggtaccgattttctctcccttgatgttggtcaggatggtgctatcaagcgctggcaccaccacatgggcggtcatgatggcatcggtatcgggcattacgtcgacaaagggtttcagttcggtctgttgccatgaagccttatccgtgttgacgctggggagggcaaaatgggtatccgaggcgacgttgccgtgcccagggaagtgcttcagagaggtgagtaccggatattggtgaataccctcgatatagctgcgagctaatttcccaaccagaatcggatcgtcggaataagagcgaacgccgataactggattattctggttgttattcacatccactaccggcccaaagttaaagttaaacccaaggctggttaactcataaccatgaatattcccggcttgtttggctaaatcggccacaccggtagcgcctagcgccatattacccggcatctcggtgcccacacgcagacgagtaacatagccgccttcctgatcggtactgataaacagcggtaaattagtccgtgcgtgctggaaattattaatcaactcaaccgtttgtggagtgttaatcaggttttcacggaacaggatcactgaacccaaatgatagtccgtcatcattttactgacgtgggtattcatctcggtaaaaggggttttactttcgctgctattttcatcccagtaacgaatgtcaatcatcaacatttgtccgagtttttctgcaaaactcatgtcggcaatgagcttttcagttgcacctttgggggaaagccacatctcttttagttgggcttctggaatagcggcagcatagcttccggcgctaaataaaaagatggccggtattatttttttcatgggatgactccgaggtatcaatttccggcgattgtacattccaaaccaggtaataaagtgataattatcacagttgatcgattcgtgtttgtggcgcggaaaggaataatgccggttttttataccagcattgtatcgcgcagcttgattggtaaagggggcgagcaaagaataaccctttaagggcaagaatatcttgcggtaattattttaatcccgtcataaaaagttaagataattcttgtcattgttttaatggtattcggtttttcctgggggtcagtcgtccaggttattaatggtcatgctcgcattcagcaccagaggttttgcaatctctttgcgtcgttgcattaacgccaggaaaatcaaatccgtcagggtattttgtgcggttctggacgaaatcgaagagctacgccactcgttttcatcagagacactttccaatacataatcggctattttggctaaaggattgtccttgctgccggttatggcgaccaccgtcgctccctgtgctttggccatcgaggcggcgatatgcatatctttcctgcggccactgaaagaaataacgatttgaacgtctttggcggttagcgcctgcgcggtggcgatctggacgtgaaggtcggcttccaccaggctcaggataccgatcttctgtaatttgtagctcaaatctttggcggtgagacccgagccccaaatgcctacgatctgtacgcgttgcgcgttatcgatggcatcgaccacctgttggaaaatggcgaaattgatcctttttgtcgtctcgacgatcgcggcatttttctcatgggccagtttttgtgccaccaccatcaatgaatcttccgacgagatggcgttatgcaaggccttgtgcggataggacttgaacaggttatttctacccagctcctcactgatggcaattttcagggcagggaagcctttcatgccgattttctggctaaacttgacgatggctgactggctgacccccgcatcttcagcaaactgggaagaagacatactcaggacgacttccgggttatcaaggatatatttagcgatcttttgctggttttcggccaggcttggcaacaaccaggtgatttcgttcaggactgacatcaacaatatctccactgtgtgtaatagattattccagttagggggcttttcattcctttgacttatttatttgaaattgttgaaaattaaagtttaaatggcggttatttttccgttttattcctgatttactcgtcggcgagaatagatttaccgtgacgattatcacatttgccgaataaataattccttaacattgtcgaaaatcttaacccattggaagcccctatgaagataaatttaagccagatggtgacggaaagccgcaacccggccagttcgcaaattgacacgctacctactctggacatgctcgcagtaatcaacagcgaagaccaaaaagtgccgctggcggtagctgccaccttgccagaaatcgccagggtagtggatctggtagtagaggcttttgcctgtggtggtcgattgatttattgcggcgcaggcacttctggccggttggggatcctggatgccagtgagtgcccaccaacatacggcacgccgcgtgaacaggtcgttggtctgattgccggggggcatgccgcgattttgcaggcggtggaaaatgccgaagataatccgcaaatgggcgaacaggatctgcgtaatctcgatttcaacgcgcgtgatgtgctggttggcatcgcagcgagtggccgcaccccttatgtactaggggcaatggcgtatgcccgtagcgttggggcgactgctgtagccatctcatgcaatccgaatagcgcaatgagccaggcagccgatatcgctattgaaccggtagtcggcccagaagtggtgacggggtcgtcgcgcatgaaagcgggaacggcgcagaagttaatcctgaatatgatcaccaccggcgcgatgatccgcagcggcaaggtttacagcaacctgatggtcgacgtggaggccaccaacgccaagctgatacagcgccaggtcaatatcgtggtcgaagccaccgagtgcagcccagaggaggcggaagaggcacttaatcaatgtcagcgtcactgcaaaaccgcgattgtgatgatcctcggcggcttgtctgcccctgaggccagcgcggttttgagtaaaaacaaaggatttatccgtcaagcactgcaagggatacaggcataaccatggcgaaaataaccgttcctatgatagagcaaattttacttctggtcggcggcagtaaaaatatcattatctgcggtaactgcatgaccaggctgcgtctgacgttaaaagatcgtcagcagatacggctccctgagttgaagaagatccctggcgngatgagttgaagaagatccctggcgtgatgggggtagttaacggcgacgatcaactgcagattatcctcggccctggcaaagctcagactgccagcgagatgatgaatgcgttgttaacggcgcagccgcagcaggaacgggggaatgcggagcaagctgacttgcaggccctggcaagtgaaaacaagcagcagatgaaagccaagcaaaatagcgcggtacataatttcctgactaagtttgccacgatttttacgccgttgatcccaggttttattgccgcagggctgttgttggggattgctaccctgatgcagcaaacgctgatcgtggagggcgtggcaccggccgcatggctcaaagggctgatcgcttacatgaaagtgttcagcatcggtttgtttaccttcctcagtatcctgatcggctttaatactcagaaggcctttggtggcaccggggttaacggtgcgatcatcgcttcactgtttgttttacgctatgtccctgaaggaactacaggctattacgcagggatgagcgacttttttgggctggcgatcgacccacgcggtaacattattggggttctactggcctgtatcttgggcgcatggatcgaaaggcaggtgcgccgggtgatccccgataatctggatatgatcctgacttcgtcaattaccctgctgatcactggcgccattacctttgtggtgattatgccggttggcggtgagttgtttaagggcatgtcatggctgtttatgcacctgaacgacaatccgttcggcaccgccattctggccgggttgttcctgatcgccgtagtgtttggcattcatcagggctttgtgccggtttactttgccttgatggatgcacagggctttaactcgctgttccctattctggcgatggccggtgcagggcaggtgggagcgtcactggcgctgtttgctcggtcacctaaaggctctttgctgcgtacccagattaaaggtgccattttccccggcctgctggggattggtgagccgctgatttacggcgtcaccttaccgcgtttgaagcccttcgttaccgcctgcctggggggcgcggtcggcggcttctttatcggtctggttgcctggatggggttgccggtggggctgaatacggtgtttggcccttcgggtctggtgtcgattccattaatgacttcagccagggggattttcgctggcatgctggtttatgtcgccggtatattgatctcttataccgccggatttattctgacctggctgtttggcagtaaagatgttgatttaagctgatttaatttgttttaacttgtttttggttgatttaatactctcatcacacgatggcccggtttaccgggccagacacccctaagcggctacgctaaaacgggcgccgtatatttcacatctctcaattaatcaattatttaactaaatcttggcgtgtatacatccccctgcaaattcagcaatattgccattgagtttgcgatctctgcttttaagccaacatttaattttttgttataaaaaattgaagatattattttttaattgtcaactattaaattgattggtttttccacgatgttgtagactcttatgcatcaatgactataattgacgttaaatttattattccctcgtaatttgaagagtgataggcataaaaaagtaataccatcgctctcaacactgaagcttattttatcaggtgaaaaatgcatcatccacaaagtcctttaccattggctagcccggtgggactatccttattgcctctagggctgttactgatttggttgatatttcttagtccgcttgccttgcccaatatgggcggaagtggcctgaaactaccgcataatatcctgacttgggcggtgatggctgccgtcactgccaccctctggctgacactatcggccaactcttccatttcgcttagcgtaactgcccgttggctgctgctggccgtggtgatcctggcaattcccctattatatacctcgccacattggcagagtgcgggaatggcacgctggcttgggttagctggcggttgggttttttacgtctcatggatgcaatatcgcccaccgcactttgcccggcattggctattttacgccattctgctggccgcggtattccaggcgctgattgctctgttgcaattggccttaccggaagtcgtaccagcctggtttgactacccaatgaaaaacggccggccttatggggtcttccaacaggtgaatgttctagccagctttatcgcttgcggattggcactggcattgatgctgttgttgttgttgcctgatttttccttaacccagccaaaagcagaacgatacagacgttatgccttggggttggtgctggtgctgtttcccgcattgttggtgtggttacagtcacggatcggctggcttggcggcggtatcagcggggcgttgttgctctggttgggatggcggcaggcaaaaaagctcacgggtaccgcaacaggcctaatgcttttgggtatcactatcgcattcatttttcaaataaatggaggagttgaaacgattgaacacaccacatcaaaccaggcccggttgatcatgttgcaggacagcataaagatgattgccgaaaagccttggctgggttggggttacggtggattcgaatatagctttcagcactatcgcctggctgccggattatccacattgggtcttggcgtggtgcgccatccgcataatgaaatcttgctgtggtgggttgaagggggcatggttgccttggctggcatgatagtcttactgtgtgccggtatcaggttgctccggctatcctggcgaaaaaaaggcgcaagcctggcgttggccatcgtgctgctccctttgctgttacacagccaaacggaatacccgtttatgctgtctagcgcacattgggccatttttttactgctgctggcacagtgggattgccaaaccgataaggccacagaacgcaccaagttatcctcagtaactcactcatttttaagaactgtagtgcctatggcttcagccgccatctgcatagtggccagtattgggctatatgccaatttgtctttaaccgcctttgaacgtaatcactttgcggatattcaacccgctcgccgtgcgatggcatttgacccctgggtgaataccgaacgttggcattacgatcaacagacccatgcgttgctaatgtataaccagtcccgcgacccccgcttgcttgaaaactatgctcaatgggcacagggctatcttgctcagcggatcgataaaaatgtttatgcctcatggttggctatcgcgcaatatcaacaggataccgccacctaccggcgtttacatcaggaagcaaaggcattatttcccaccgatccacggtttttaaacgatttgcctgagtgaagatcgataagtttacacggggatgcggactatgacccgtgtaagcgcacaatgcgctggtaagagtgggcaatccgttggcctgccagcgcaggtcagtgacttatcatgtgcctagctggtacggtatgccctaatatggatagcaaggaacagggaatgtttgacattatcagcgatttggttgggatggtattcagaattatttttgggatattggaagccatctacgaaattgtgaacttcatttattcttttaccaaagggcgtacgcgaagacgggtgttaatcaccttattggtatttttggcattgctcggtctgttctgctggtggattgttaattgtaaatgggcgcagcgtgctgcacccctggtgtcactacatctatcaggccttactaccttgcccaacgtggccccaaaccatctcgcccttatggaacgtggcggttcttggggaaatgcgtgctaccgcttcggcggagcaggaggcatcaaccagcacgaaactggcatcgtcctgggctttcggccatacgcgttcccctttgtcattcagcggcaagacatcaccggtggcgagcgccaacgaacgtgacagagttccctcattcgggcgtacgtaaagctgagcgtaaaggttggctttctccagcatgtcgcccaagccatacggcgaccagtggtcgatcacgctgtcggtgccggtcatcaaaaacacgcctttctcacgcagctggctgagcggcatgtgcatagtgccgatagggaccgtggtggcaatggtaatctgctgtgctgccatacgggtagcaatctcatccacctgctgttcattcatcattgccagcgcaaaggcatggctaatggtcagcttgccctttaactgtggcgttttctcgacggttgctaccatgtagttcaccgccgcaatgcctgccgggctggtttcgtgcaggtggatgtccacccctttgttataatccagcgcgatctggaacatgctatcgagcgatttttccattgcgccatcgacgttggtcggatccagaccaccgacatagtgcgctcctgcctgcattgcctcacgcatcagcggctctgatttcgaatacaacaggccatgctgtgggaacgcgacaatctcgcagtcaaagccagatttgcggcgtgccagcacttcttgcagattctccaggtttttcagccccgaggttggctcaacgttgcaatggctgcgggcggtggtggaaccataggactgaattaaatcgatcagcttttcggcccgctcttgggtgtaaggttgcagttccggcagcagcttctgctccagcctgatcatatccttgatggtggtgcccgccgggcgattcagcgaacgccatgggccgccgtaaaaggttttgtccagatggatgtgcatatctcgcatggcgggcagcatcagcttgccgccagcgtcgtaaaccggcagcgtactgtccgcatgctggcggttatcgcgcaaggcaacgatcttgccctggttgatctccagcgttttcaattcggtgcgagtgctgaccggggttgctccgtcaaactcaaaacccgcctctagcagcacgttatccagataatagtgcgggtcggtaattttcatgcgttggtctgcctcacagttcgcggttgccgggttagcagcataaccgacggaggaggttgcccccaatagtgcgcaggccgcagccactttgccactatggctcaaaaactcacggcggcttttgttctcattcatctgttgttgcctctcagaggttaacgatatgggtgcccgtttcaccgcgcagtgcggcggggaggcaatccggcgaggggatgacgacgcgtttgccgccgtcgcgtaagaacgccaggctggcgacgatcttcggcaacatgctgcctgccgggaagtggccctctgccatatagcgggtcatttcggccacgttcacctggcctaacgcttgttggttcggcttgccaaagtgaatgcacactttctccacgccagtggtgatcaccagtacgtcggcgcggatttccctggcgagcagggcagtggacagatctttatcgatcaccgcatcgacgctttggtaatccccttgcggattacgcgcgacaggaatgccaccgccgcccgctccgatcaccacaaacccttgttgagtcagcgccttgatagcgtcggcttccacaattctgatgggttctggcgaggcaactacccggcgatagccgcgcccggagtcttccacaaactgccatgtggggtattgctgcaataaggcatcacgctgttgttcgctaaagaaggcgccaatcggtttggtagggttggtgaaggcaggatcctgtttatccacttcaacctgcgtgatgacggttaccgctttctgtccgccatgctgtgccagacggttgttgagtgcctgctgaatgagatagccgataccgccctgggtatccgccacgcagttggccagcggggttagcggcagtccttcatgttcgtgggccacttctgcacggcgtaattccagccccacctgcggaccgttgccgtgggtgagtacgatgtggtaatccgatgccagcatttccagcaccgagtctgcgacctttttcaccgcctcggcctgatgttccacggtctggctggcgttgtctttgataatgctgttgccaccaatggcgacgacgacgagttctttcatctgggtcttccgattaaaaaggccgtttaaataggggtgggagcctatgaatgtcccctcaccctaaccctctcccacagggagagggaaccgatcgagttcgttgatttttccgtgtaataccttgcttttattactccctactgtccgggctggttgcgcactcggggcaactccctctccctgtgggagaggggagggatgagaggtcaggcggttttggttggctcttgcactggagctggaaccgtttcacggctatcgagaaaatgcttcaccacaaacatggccgacatcatcaggtaagccagcgtgaacagcaatgagcttccctcggcaaagcccacggctggcgcatggatcacgccgaacagggccagcagagcaccagttgccgccgccaccgcaccacgcagcggtttgttgatgatggcgaaaatcgcgacacagccccacagcatactggccagtggcgcaccgctacccaaatgcaccagcccctggtaatacacgcctttgctatgcagcaactcagcgcccagcttggctcccgaggtgcccgccgcccccagcacgctgttaaccatggttaatccccagttggcgatccacgggaacaggcagatgaagatcaccgggacctcgattttcggcgtttccctcaccacctgattggcggtgaccacgccgataaacaccaggataggcacgatcgccgtcatcgggatcaccgccaacataaaggcacccagcccgaacagcggaaccaggaacatcgtcacgccggacgccaaggtgtaaccaatgctggcccccatggctttccagccggcgtggccaacatacacggtcaccgggaacgggttgcctagcaggcagccgaacatggaggagaggccgttggccatcatcactttgcgggtgttgtattcatccccggcggcgtgcgcactctcgatgttctctaggtcaaagatgtagttcgccagccccagcgggacggcagaggccagatacggcagcgcgtgtggcaggccctgcatgaagctgtcgacatggaaccccggcgggttaaagccaaaggaagacattgaggctttaatcgcatctgggctttgcaggccggagatccacgccagcgcagtaccggcgatcagcagcagcaaaccggtcggaatgcgggcgaatattggctttttgccaaaccagttgataaagatcagcagcagcacgatgaacgaaacggtcggcgcttcgaacgcctgcaacatcgggttcatcgccagtagcaacagccccaggccggaaaggcaggagagcagcacggtgcgcgggatcatcttgcggatggtttcgccgaggaaagagccgcccaccaggatcagtgcttcaacaaagcaccacaccaggccgatcgaaatggcaaagtccgcatcgccggtcgactgataaaccggcatcagcaccaggaaggtcacggtaaaaatagacggcgcactcgggccagaaggcagcgcggtcacatcgctccgcccggtctggcgagccatttgcaggccgaaccaggtgtaacagatgctggccatcatcacggccagaccaaaggccggggctatgcgcccgtagacaatctctttgggaatacccaccacaaagatgagtaaccccatcatggtgagcaggttggtcaggttattggtcatcagcccgaagtaggctgcccagtcaccgcgtttccactctaatttcattttgttcatggaaaatccttcacaggtcgtttaacaactctcgacgatcaacgggatcgccattggtcctgcaggtgaacaactctctggtgtcaggtggggctaacgctgggttagccccgttttttttattggcagtagtggtcgcgatacctcagtattgctttctcaaaacaggcgaacggcggggggacaaacccggcaccgatcatgccgatcccggcatccttatgggcaatggcggtattgatcaccggcaggatgccgctgctgccgaccttggtaatatcgatcgccgttgggatccccataaacgacagcaggggaatagtgacgttggggttttcgcccagggtgatttcacgcatctggcgtgagaaatcgatcgcttcatccaccgtgcccccgaccagtgcaacgatggccggagcggttgccatggcaaaaccaccaatgccgtaggtttcggtgatggcgctgtcaccgatatccagccctgagtcttccggtttatagcctgcaaacatcgggccgataacctgctgcgctgggccggtaaaccactggcccggtagcccgctgatgcgcagaccaaactcaacgccgttacgcgccatggtggtgaccacggtgctgtactcaataccgtgcgccgcatccattgccgctttacacatcgccatccaggttgggccggagaagtaatcgctgctggcgacaaagtcgaagacctcgcgctgctgctcaaccgggtagcccgcctggataatccacggcgtcagcgcctggatcagcagtgaagtgcccgcattgttgcggttgtggcactcgtcgcccatatgcagcgcttgcgccagcatcagccgcaggtcgatctcaccggccagcttcatggcatctcgcagcatcgggccttgcacatcgcgcatccagttgagtcggtcaatcacgctttggtcattggcccccatgcgcaggatcttcgccatctgctcgctcatattggtatatgcgcggttgccgtaggttttgttctcgacgatatgcatgaacattgacgcggacgtcacgcctgccatcgaacccacgcaatcatgctcgtggcacggcgagaagatgatttcgccggatgctgccaattctgctgcctcgtcgaggttggctgccagcccttcaaacaccagcgcaccggtgaccgcgcctttcatcccaccgcacattttctgccaggtgatcggtgggccggcatgtaaaatggtgttgcgcgtcataccagggacgacgttgatcgcctggtcataacctaccagcaccggatgcgactgaataatgcgttccagcgccagtttgttcgcggcagccactttctcggcaagcgcgggggaggcaatctgatcgagtgcctcaaccaccgccatattgccctggcccggtggagtccaatcgagctgggttaccggcacatgctgttttttgagatcatcactgaacatggcgataccgacgttaatgacgttcagcggttggttgaataacgtgtggctcatcaggctttccctcctttacaaacaaattcacgcgccagcaatccggtattggtgctgctgctagcccagatcactccagcatcggtgagcatctggcactgctgctgtagcgacggcgtatcgagatcggtgcccagcacatagccgaggatctccaacggtcggctctcgctggacgcaatagccttggcctctttgatcgcctcgatcattacgcccaccggatcttcgtgagagccaaagccaagcacgaagtccatcacgatcacgccaacttcgggatcgcgcgcttcctgcaacagacgttggatgcggttggtcgggtcgatcatcgggtgcggtttgccattggtgaagtcgtcatcgccaaagtcgaggaaggtgtgtgccacactgcggttgaggtcttgcaggcgcttggccgggtcgggttgaatattgctgtagacgtcgtcgtatttttccagtgcggcaaacatcgcttcgtcgcacaaagtgccgccacagaacaggccgcgaatgtatttttgctgtggcgtcagcttggcacgcacttcttcaatcagcggccagttcagtggatgcaggtcgagcgactcttctttgatgccggtaagcaacacggcctttaacgctgcctgcttggttgcacgtgcaaactgtaaccctggttcatcggctggtggctcattgcgcccaaggaagcaaaccaccacgggtttacggcaggcacgggcgcgttcgagcacggtgtgtgccacggcaggggcagggggtttggagaccagtacaatcacctctgtgccgttgtcgttctctaacatctccagcgcgtccagcatcatccggccgccaattttttcgctcagatcgcgcccgccggtgccaatcagttgcgaaataccaccgccgaactcatggatacgtacgctcaactcctggctaccggtgccggatgcgccgataataccgatgttgccacggcgaaccgcgttaccaaaacacagcgctgtgccattaatgatggcggtgccgcagtctggccccatcatcagcaggcctttttcatgcgccaactgtttcaacgccaattcatcttcgatggagacgttatcggagaacagcatcacgttgaggtcgttttccagcgcttgacgggcttcacgtgccgcgtacaacccgtttaccgagatcactgcgaggttgctctccgggatatgagttttcgcactggcgagggtggcgtaacgtgcttcgtgacggccacctttatctttgtgggtgaacaaggcttcgatcgcttgcagagtcgcctcattagcttcatcgctggcacccttaatcacgatcatcagatcgccgtttttggcggcttccagctctggggttaacaagcccaggttctccagtacccctttgttcatctccgtggccatggccacaaacgcttgttcaacgccttcaagtttgttcgctttggtagaaatagacatcagcgaaacagagtcaaaccaggtgttgttttttaccacgatcctgatgggcatatttttctccaaaatatgaggtcaagaggcaggcatcggccatgccatacagcatgtcgcaacccgaacttgaaccgatctgtttaatcttgttaatggtatcgataataaggtgacgatcgtcgtgtactaatttttctaacaggtgactaatcacctgtcggtaacgctgattgattgccgtttctaaggtaatagcgcttagcagcgtggttttatgttgtgctttctccagcactgccagaaaaacctcgcgatattttcgcgccggatgaccgggtagcaataatatagagcaaagcccaaccagataatcatcaccggaaggcgtcaggccaattcccaaaccaatgagagaatgtaaggcctggtcgggatcttcattgcgccgtatcgctagaaataacgcatcacgatgaagttgtaataatctggccatttcccgataaaatatattctcgccacggtaattaaacagcgaattaccggatgaagcctgttgattaatgcaagccccccattggtgccaagcaattgatgctctgcttgcttcggttaaatacaggtcaggctgctgccatgtctggcagtgagataaatcaacccaactatgctgacctatttcaatgctgccctgagaaaactcgacgcgatctcctgggctaaatatctggtcacagtgcctgagcgctatgcggcaactattgggggcgttatcgtactcgtcgcttaataacgtgtagagcatgttctgctcgggaacgaacaggtttaccgcgcgggaaaaaacctgttcgacttgcccacttagcctctggcgggggaacgccccctccgccgataacgctgtaatgcactgccgttgaggctgtgcgatggcatttctcctcggttaagcgccggcggcaaccagcagttcagcaatttcgtgatagcctttttcgcgggccagcgtcagaggcgatttaccatatttgtcggtcatatgaggattggcaccgtgatcgagcagtaatttgacaatctcttgctgtttcgcgccgccatcatttaacacaatggcttccagcagcggcgtccaaccgacaaaattggtgtggttgacgttaatttcggtacgcgttaacaattcacgtacaatatcgacgtgacctttttcgctggccggggtaatccccacgccgccaaagcgtgttaaacggtccaaatccgggtttgctggcaataccagacgtagtagcgttaagtcgttattcaggcagctcagcaggaaggggttaaaacaggtctgatcctgcttatcaatgtctgcaccggcagcgattaataattctacgcagtcgtaatgtttattcaagctggcaagcgtaattgcggtgcggccttggcggttggtggcattgatatctgcccctttactcaggcaatttttcagcgcgtcgctgtcgccctgttccgctgcaaaaagaaattctgtgattagcgccttatcagacatattctggctccctatttttccagtgggctttggatgctttcattgctactgagaatagcaatagatgctggataaaaacatccgcttaagaatcattcatcgcaaagggtgtaattattgaaaataattcaacaataaagacaaactgtgcggcggcgcaatctttctcttatgttttgcgccttttgccacggcaaacgtccctgtggggaatgggctttcacctcccgccacatcaggctctaaactaataatcagaagtgtgattgtcttcaaatcagttgtaatcgcagtgttaaattttgttcaatactggttgcgtgtcataggatttacaaatacattcaacaatgcgtccaggggggaggaggggtcatgaattctatttttaccgaagaaaatctgttggcatttaccaccacggcgcgttttggcagcttcagcaaggcggccaaggaactggatctgacgacctcggccatcagctataccatcaaaaggatggaaaccgggttggacgtcgtactgtttaaccgcagcacgcgcagcatcgaactcaccgagtccggtttttacttctaccgtaaagcgaccgatctgcttaacgacttccatgccatcaagcgtggtattgataccatctcgcagggtatcgaggcgcgggtgcgcatctgtatcaatcagttgctctacaccccaaggcataccgcccggctgttacaggtgctgaagaagcaattccccacctgccacattacggtgaccaccgaggtatacaacggcgtctgggattccatcatcaacaaccaggccaatatcgctattggcgcaccggatacgttgctggacggcggtggcattgattacaccgaaattggcgccatccgctgggtgttcgccattgcgcccgatcatccattggcgtttatgccagagccgatctcagagagccagctgcggctttatcccaacatcatggtggaagacaccgcgcataccatcaacaagaaagtggggtggttgctgcacgggcaggaagcgatcctggtgccggattttaacaccaagtgccaatgccagattttaggggaggggattggtttcttaccggaatatatggcgcgtgaaccggtagcagaggggctgttggcaacccgcgccattcataacccacggcaggattccagcatgttgctggcgacacagcatgcggcaaccgggcaggtcacccagtggatcaaaaagcagttcgctccgggtggggtgctgaccgggatttatggggatttgctttatcgggagtgactcggggatcttggtgcctaaaatccccttaccctggcagaaagtaaactgcaccttaaacgctggctagtcacaaattaaggtgcagtgggttatggcaaaacagtcccttcccataaatgattattgggatccatcgctggtttatcaaataaaatagtgggtcgatcagaagctatataaaacgccagccactgcattgatactataatcacgatcggtcatcgggctatctttcaccgtgtcgctcatctgttcattaaatcccatcaggaacagctgccagtcgttattaatggcataatagctggcgagagaaatgtaagatgtgacgccgcttttcgcctggtattgttgcatcccgctgcgttgcgattcccgttcgctgataccataatagtaattattgaaggcgcggttttgccagcgcataccgaaaccgggaaccagttgtaatttgccaaactggaagcggtactgatagccgacatcggcaattacgccgtcgctatagcccagcacgtcggttgcaatatcagcgttgatgctcccccaatcggcatgattctgatccccggtgcccgccatggcggtcgctcgccgcttatccagtttcttcatcgccggatcgtcgctatccgcaggcttaaagcttagtggggagtagttaaccgccaaatgcagattgtgcttctcagaactcagtagattaatgccgatcccttggccgttaataaaaaactgctctccttgataagtcaaaatcggtagcggtatatattgtgcattatagtcgcgatagggtaactgttctgccagtaccccagcacctaccgaccaatcgccagcataggcattgcccgttagtaatatggctgtcagcgagaacggtttaaccattaaaaatgacgtgcgagtagataaaaaagaataatccatcatgataaatatcccagggttaggtcaaaaggtagccatcagctactaatgagccgatcactaaagttcaggtttttatcgatacgctaatgaaatgttatgacttactttttaataggctcctgttctatggaaacaagcaacgccgccattagcgttgcagggaatagtagattgtgccggggccattttaatcttccccttggatgctggctcctaaaacggcggcaaaagacccggcagcggcaccgaaggcgcgctcaatcagcaacagcatggcctgcatacgcgcggcttgctctttgggcgtccagctaaacatctggtggccgaacaggaacagcgaaccggcgagaatgaactgcaccgtcgatagcggatcatcaacttgaaaaacgccttcctggtttccttgctccaccactgttgccaggatcggcccaaaggccaacaccgtttcaatattgctgcgctcatgtaatgcgcagttctccgggcggtgtaagtcctcaaccaaagcctgcccggcttctacggtttgattctgcgcggcgatgatggcgcagaacttttcaatcgcccccagttgcggatcgtcggcaatgatttgtgagcgggcaaccatctcggcacacagttgctgtgccaacgctgccagtacttcatctttggatttgaagtagtaataaaacgtccccttggcgatgccagcgctgcggacaatggaatcaacagaggtcgactcatacccgatttcctgaaacagctcgcttgccgcctgcaaaatttcagcccggcgcacctctggcgttttcactgtacgtaccataataaatccctcttttgcgtatggagtagcgctacggtatttattgactgacggtcagtcaataaaaaatgcagtttttttgcacgcaatggccgaggtagacattccgcagattaccttccgtatctgacgactgctctgaactagtccctctcatttttgggggaggagggaacatcgagtatgtgtcatcattttgtttccctcatccaacccgttatctttcaataactaattagagttagttcgagtttgcgctgcctcgcaaaattcaatcaacaactgaacaacctgccggaacttgaccaaagacaacattttttgtggggtctatggtatccctacgcacggtgtaatggcgaaaatctgttctaacaagaacttaacgactaataaaagcactgctctcaagcaggcaaaatggatgggatgcttatgaataaggtaagcaagttattgatgctatttctggcagggatgtacgcggtttttctctctttctcggcacaggcagatgcgacacctgccgccacgccgcagaaggttgaagccaagaatgaaaccttctctgcacctcaccctgaccaatataagtcctggcaggcgacttccgagcagtccgatcgggtagacgctttggctggcgacccgcgtctggtcattctttgggccggatacccgtttgccaaggattacaacaagccgcgtggacatgcctatgccatcacggatatccgtgaatccttgcgtaccggtgcaccaaaaacggcagaagagggtccgttgccaatggcctgctggagctgcaaaagcccggacgttgccagggtgatcgccgaacagggcgaagcgagttatttccatggtaaatgggcgcgtggcgggccggaaatcgtcaataacctcggctgtgcggactgccacaataccgcttccgctgattttgccgccggtaaacctgcgctgcaactttcccgcccttatgcggctcgcgctatgcagacgatcggcaagccgtttgatcaggcaggccgcttcgaccagcaatcgatggtgtgtgggcagtgccacgttgagtattactttgatggtaaagacaaagcggtgaaattcccttgggacaagggcaccacggttgatgacatggaagtgtattacgacaacatcgaattttccgactggaccaacccgctgtccaagacgccaatgctaaaagcccaacatccagaatatgaaacctggagcgcgggtattcatggcaagaacaacgttacctgtatcgactgtcatatgccgaaagtgcaaaacgcccaaggcaaaatctataccgatcacaaaattggcaatccgttcgataacttcgagcagacctgtaagaactgccacacccaggataaagccagcatgcaggcggtggtggaaaaacgtaagcaagacatcaacgaaatcaagctgaaggtggaagaccaactggtccacgcgcactttgaggcgaaagcagcctgggatgccggagctaccgaagcagagatgaaaccgatcctgacccatatccgtcatgcacagtggcgttgggactttgccatcgcttcccacggtattcaaatgcatgcgccagaagttgcattgcgcattttgggcaccgcgctcgatcaggcagcacaggctcggactcagttgatccgtctgctagcgaccaagggcatcaccactgaaatcccactgccagacatttccaccaaggaaaaggctcagttggcgctcggtatggacatgccgcagctgaacgccgaaaagcaggaattcctcaagacggtggtaccgcagtgggaagaacaggcacgtaaaaccgggctgttaggcaaataacccctccgccccgtgtgcggggcgtaaacaaatggagtcaatatgagcgtactgcgttcgttattaactaccggggtgcttgcctgtagcctttggctgacagtgttaccggtatcggcccagaccgacagccccgctgttcaacagaaatcggcggaagtcaccttgcaacgtaatccggatgaggcctgcctgcgctgtcacaagccgcaacagaatgcgatgcacggtaaacatgcgggagccattaacccgaataacaaattgccactgacctgcaccaactgtcacggtttaccttcgctgcatcaccgtgagggcgtgaaggatgtgatgcgtttcaacgagccgatgttcggcgtggaacagcaaaacagcgtttgcctgtcctgccatttgccagagacattgcaaaaagccttctggccgcatgatgtgcatttggccaaggtgagctgcgccagctgccataccttgcacccgcagcaagataaggtacaggggctgaacgacaaggggcggatcaagctctgcgtggactgccaccgtcaacaacaggatgatcccgcgtttaatccagcgtccgtaaggctggataaggggcagccatgagctgctcacggcgccgttttatcgtaggcattggcgtgttggcggctggctcgaccctggcggaaaagctgctggcgcgcaccatgaacgtcaatggcatccgttacggcatgatccacgatgagtcgcgttgcatcggctgtaccgcctgtatcgatgcctgccgcgaagtcaatcaggtgccggtgggcgtttcacgcctggagatcgtccgtagcgaaccgataggccaatttccggacgtgaaataccggtttttccgccattcgtgccagcattgcgatgatgctccctgtgtgcatgtctgcccaaccggagcctcgtttatcgatgccgccagcggcattgtcgacgtgaacccggatctctgtgtcggttgccaatactgcatcgctgcgtgcccttaccgggtacgctttattcatccggtgagcaaaacggcggataaatgcgatttttgccgcaagaccaacctgcggcagggcaagcagccagcctgtgtactgtcgtgccccaccaaggcattaacctttggcaatctcgacgatccacacagtgatatttcgcgtctgctgcagcaaaagaccacttatcgctacaagatagccttggggacacggccaaaaatgtatcgcgtgccgtttaaatatggggagacaagtcaatgacttctgcctttcattttgactctctggtctgggactggcccattgcgatttacctgttcctgatcggcatctctgccggtttggtcactctggctatcctgttgcgccgttatcatccagaagagggggcctcaaacagccgggtgatgttaaccacgctgtttatcgccccaacctcggtcatgcttgggctggtgatcctgatcttccacctgactcgtccgtggaccttctggaaactgatgttccactatagcgtcacctcggtgatgtcgatgggggtgatgctgttccaggtctatatggtggtgctggtggtctggctggcgctgatcttccgtgacgaggtggcggcgctgcaacagcgttggttgccaaagctgtcggtgatcccacgcctgctgcaacgcttgcttccgttgttgaggccaatagaaacggtaatgctggtgttggcggtgctgttgggggcttataccggttttctgctctcggcgctgaagtcgtacccgatgttgaataacccgttgttaccggtgctgttcctgttctctggcgtttcgtccgggatcgcggtggcactgctggtggcggccttcggacccaaaggtcatctgcacagccgggaagtgcatttcctgcatcgcctggagacgccggtggtatggctggagatcttcctgctggcggcgttcttcatcggcctgtggctgggggatgacggcaaactccgtgccttgtcggccgcgcttggcggtgggttctggtcctggtggttctggttgggcgttgttggttgcgggctgattatgccattgctgctgaaggccttgggctgggggaaagcgcatttccatatcctgttgatcagcggcgctagcctgtgtggcgtgctgttgctgcgttattttattctgtatgccgggcagatgacggttgcctgagtgcttacccgtcgtctttcaagccgcagcgttgttacctgcacttgcccaccccagtcacttactaaaagtaagctcctggggatgaacaagcttgtcgcctagcagtgctgtacaaggatgtacgaatgccgcgagcgcagggatgcgcatgagcggccgacttgaaatccatagggtagagcaggacagatagaagagaataaggcggtagatgtgttgtggttacccgagctgggatttattgggttattgctggcctgtacggcgtcgctgctgctggctggcattacgctgttgacgttgatggatcgccgttggggtgggctgttgccagtgcgtggctggagcctgagcatttttgtgttaatcgcactgtctttcgccattctgctacagctgtttttgcaaaatgacttctcggtcatgtacgtagcacagcatggtcacagccagttgccaccgctgatgaaggctggggcgctgtggggtgggcacgaaggctcgctgctgctctggctgctgtgcctggccggttggtctgcctgctttgccttgttcagccctaaatcgatgcgctcactacagccgctcacgctggccattctggcgttgatcgtcggctgttttctgcttttcatcctgttcttctccgatcctttcgttcggctctttcccgccgcggttcaagggcgcgatctgaacccgatgctgcaacatatcggcctgatcctgcaccctccgctgctctatttgggctatgcagggtttgccacctgtagtgctctgatgcttgctgctttgctgcaaggggagtttagcgccgagattgccgggcagtgcctgcgctgggccaaaccggcctggtgtttcctcactgccgggattattttggggtcctggtgggcttacagcgagttgggctggggcggttggtggttctgggatccggtggagaatgcttcactgctcccttggctgaccgcgactgctttgttacacagtttggcagtcggccagcgtaccggaggattgcggcattggtcgctattgctgacgttaggcacctttgttctcagcctgctgggcaccctgattgtgcgttctggcatcctggtttcagtgcacgcctttgcgttggatgagcagcgtgcattgccgctgtttatcctgtttgcgttccttagtggttcatcgtttttgatttatgcattacgtgccaaccgggggaaagccgttatgtccccggtgaaacctgcattgctcggcgccttgttgcttctcagttccgccgcactgatcgtgctggtggggactttgtacccgatgctctatcggataatggggtgggggcagatctcggttggcgcgccttatttcaatctggtactgctgccgtttgggctgctgggtttggtgttgatgtgttacggcggattcaggcggcggcgttatgctcagtggatcgctcacgcaggagtgctgctgacggcattaggcattgccagttcggcgctgcaacgccatgaaatcagcctgaacgtcaccgtgggtgagacggttagcctggcgggataccaatttacgctgcgttcggtagatctacaggctcaggctaatttcaccagtgaacaggcggtgattgaggttactcagcaaggcaagcccgtggcccagttaacgcctgaaaggcggttttacaccgcccgccgccaacagatgtttgagccgggcatcgactggaacgctttccatgactggtacgtggtgatgggcgaaaaaagtggcgagcagcgttatgccatgcgcttttatgtgcagaccggcatccgttggatctggtggggtggggcgttgatgatgattggcgtgttggccgccggttggcaaaggaggcaagcatgcgctggttaactgctctgttgttgtgggggagcatcacgttgccgctggcggcccagatcgtcgatacctgggcattcacctcgccggaaatgcaggagcgggcgctgacggtggcaggccagatccgttgcccgcaatgccagaatcagagcctgctggagtccaatgcccctgcggcggtcgccatgcgccatgaggtgtttgccatgaccgaacaaggcaaaacgcaggcggaaatcatgagttttatgacggcacgctacggtaactttgtccgctaccaaccggcttttgagccctcgacgttgttactctgggggctgccaccgctgatgttaggggcgattggtctggtgttatggcggcggaggaaagcggaatgaaatcgcgttcttaccctctgctgtttatcgtgctggtgctcggcctttccgcgggttggtatgtggccagcggccgtccggttaccgtgttggccgaacagcataagcgcagcttgcctggccaaccgctcacgcctcagcagcaggccgaaagcgagttacagaagttacagcagaagatcgaccagtcaccgcaggacagcgtgttgtgggcacagctgggggaatattatctgtttaacgataattttgccgatgcgcaggcggcctatcagcgggcattggctctgcggggggcgaatgccgaactttactcggcgttggcaacggtgctttattaccaggcaggccagcgtattaccccgcaggtggagagcaatatagcaaaggctttggcactggataaggatgaggtctcggcgttgatgttgctggctgccgatgcctttatgcatacggaatatgccaaggcgataagcttatggcaacgcctgttggacagccagtcaccacgggttaaccggccacagctgattgaggctatcaatatggccaagctgctgttacagaatcaataaaattgagcgatctccccnnnnnnnnnnnnnnnnnnnnnnnnnnnnnnnnnnnnnnnnnnnnnnnnnnnnnnnnnnnnnnnnnnnnnnnnnnnnnnnnnnnnnnnnnnnnnnnnnnntgacaacgccgtagcaactccctctcctgggggggaccgtacgtgccacctgttggctaatttatttatcctatatatcaatatattaaagttaaactctgcacataacgataacgccgtagcagctccctctcctgaggggaccgtacgtcccacctgttggctaatttatttatcctatatatcaatatattaaagttaatctctgcacaaaacgacaacgccgtagcaactccctttcctggggggaccgtacgtgccacctg
